(19) United States
(12) Patent Application Publication
(10) Pub. No.: US 2016/0053276 A1
(43) Pub. Date: Feb. 25, 2016

(54) PLANTS HAVING ENHANCED YIELD-RELATED TRAITS AND METHOD FOR MAKING SAME

(71) Applicant: BASF Plant Science Company GmbH, Ludwigshafen (DE)

(72) Inventors: Jenny Russinova, Astene (BE); Christophe Reuzeau, La Chapelle Gonaguet (FR)

(21) Appl. No.: 14/410,161

(22) PCT Filed: Mar. 15, 2013
(86) PCT No.: PCT/IB2013/052086

§ 371 Date: Dec. 22, 2014

Related U.S. Application Data
(60) Provisional application No. 61/662,944, filed on Jun. 22, 2012.

(30) Foreign Application Priority Data
Jun. 22, 2012 (EP) 12173160.8

(51) Int. Cl. C12N 15/82; C07K 14/415

(52) U.S. Cl. CPC C12N 15/8261; C07K 14/415

(57) ABSTRACT

A method for enhancing various economically important yield-related traits in plants is provided. More specifically, a method for enhancing one or more yield-related traits in plants is provided, by modulating expression in a plant of a nucleic acid encoding a POI (protein of interest) polypeptide. Also provided are plants having modulated expression of a nucleic acid encoding a POI polypeptide, which plants have one or more enhanced yield-related traits compared with control plants. Constructs useful in performing the methods of the invention are further provided.

[0001] The present application claims priority of the following applications: EP 12 173 160.8 filed on Jun. 22, 2012, U.S. 61/662,944 filed on Jun. 22, 2012 all of which are herewith incorporated by reference with respect to the entire disclosure content.

### BACKGROUND

[0002] The present invention relates generally to the field of plant molecular biology and concerns a method for enhancing one or more yield-related traits in plants by modulating expression in a plant of a nucleic acid encoding a POI (Protein Of Interest) polypeptide. The present invention also concerns plants having modulated expression of a nucleic acid encoding a POI polypeptide, which plants have one or more one or more enhanced yield-related traits relative to corresponding wild type plants or other control plants. The invention also provides constructs useful in the methods uses, plants, harvestable parts and products of the invention of the invention.

[0003] The ever-increasing world population and the dwindling supply of arable land available for agriculture fuels research towards increasing the efficiency of agriculture. Conventional means for crop and horticultural improvements utilise selective breeding techniques to identify plants having desirable characteristics. However, such selective breeding techniques have several drawbacks, namely that these techniques are typically labour intensive and result in plants that often contain heterogeneous genetic components that may not always result in the desirable trait being passed on from parent plants. Advances in molecular biology have allowed mankind to modify the germplasm of animals and plants. Genetic engineering of plants entails the isolation and manipulation of genetic material (typically in the form of DNA or RNA) and the subsequent introduction of that genetic material into a plant. Such technology has the capacity to deliver crops or plants having various improved economic, agronomic or horticultural traits.

[0004] A trait of economic interest is increased yield. Yield is normally defined as the measurable produce of economic value from a crop. This may be defined in terms of quantity and/or quality. Yield is directly dependent on several factors, for example, the number and size of the organs, plant architecture (for example, the number of branches), seed production, leaf senescence and more. Root development, nutrient uptake, stress tolerance and early vigour may also be important factors in determining yield. Optimizing the abovementioned factors may therefore contribute to increasing crop yield.

[0005] Seed yield is an important trait, since the seeds of many plants are important for human and animal nutrition. Crops such as corn, rice, wheat, canola and soybean account for over half the total human caloric intake, whether through direct consumption of the seeds themselves or through consumption of meat products raised on processed seeds. They are also a source of sugars, oils and many kinds of metabolites used in industrial processes. Seeds contain an embryo (the source of new shoots and roots) and an endosperm (the source of nutrients for embryo growth during germination and during early growth of seedlings). The development of a seed involves many genes, and requires the transfer of metabolites from the roots, leaves and stems into the growing seed. The endosperm, in particular, assimilates the metabolic precursors of carbohydrates, oils and proteins and synthesizes them into storage macromolecules to fill out the grain.

[0006] Another important trait for many crops is early vigour. Improving early vigour is an important objective of modern rice breeding programs in both temperate and tropical rice cultivars. Long roots are important for proper soil anchorage in water-seeded rice. Where rice is sown directly into flooded fields, and where plants must emerge rapidly through water, longer shoots are associated with vigour. Where drill-seeding is practiced, longer mesocotyls and coleoptiles are important for good seedling emergence. The ability to engineer early vigour into plants would be of great importance in agriculture. For example, poor early vigour has been a limitation to the introduction of maize (Zea mays L.) hybrids based on Corn Belt germplasm in the European Atlantic.

[0007] A further important trait is that of improved abiotic stress tolerance. Abiotic stress is a primary cause of crop loss worldwide, reducing average yields for most major crop plants by more than 50% (Wang et al., Planta 218, 1-14, 2003). Abiotic stresses may be caused by drought, salinity, nutrient deficiency, extremes of temperature, chemical toxicity and oxidative stress. The ability to improve plant tolerance to abiotic stress would be of great economic advantage to farmers worldwide and would allow for the cultivation of crops during adverse conditions and in territories where cultivation of crops may not otherwise be possible.

[0008] Crop yield may therefore be increased by optimising one of the above-mentioned factors.

[0009] ATP-dependent chaperone like proteins ClpA (At3g52490) are part of the ClpAP protease that participates in regulatory protein degradation and the dissolution and degradation of protein aggregates. For example ClpA recognises sequences in specific proteins, which it then unfolds in an ATP-dependent manner and transports into the degradation chamber of the associated ClpP protein. A small adaptor-like protein, ClpS, modulates the activity of ClpA and is an important regulatory factor for this protein. It protects ClpA from autodegradation and appears to redirect its activity away from soluble proteins and toward aggregated proteins.

[0010] Depending on the end use, the modification of certain yield traits may be favoured over others. For example for applications such as forage or wood production, or bio-fuel resource, an increase in the vegetative parts of a plant may be desirable, and for applications such as flour, starch or oil production, an increase in seed parameters may be particularly desirable. Even amongst the seed parameters, some may be favoured over others, depending on the application. Various mechanisms may contribute to increasing seed yield, whether that is in the form of increased seed size or increased seed number.

[0011] It has now been found that various yield-related traits may be improved in plants by modulating expression in a plant of a nucleic acid encoding a POI (Protein Of Interest) polypeptide in a plant under non stress conditions but also under conditions of environmental stress.

### BRIEF SUMMARY OF THE INVENTION

[0012] The present invention concerns a method for enhancing one or more yield-related traits in plants by increasing the expression in a plant of a nucleic acid encoding a POI polypeptide. The present invention also concerns plants having increased expression of a nucleic acid encoding a POI polypeptide, which plants have one or more enhanced yield-related traits compared with control plants. The invention also provides hitherto unknown POI polypeptides, POI nucleic acids and constructs comprising POI-encoding nucleic acids, useful in performing the methods of the invention.

[0013] A preferred embodiment is a method for enhancing one or more yield-related traits in a plant relative to control plants, comprising the steps of increasing the expression, preferably by recombinant methods, in a plant of an nucleic acid encoding a POI polypeptide preferably said nucleic acid is exogenous, wherein preferably the expression is under the control of a promoter sequence operably linked to the nucleic acid encoding the POI polypeptide, and growing the plant. These inventive methods comprise increasing the expression in a plant of a nucleic acid encoding a POI polypeptide and thereby enhancing one or more yield-related traits of said plant compared to the control plant. The term “thereby enhancing” is to be understood to include direct effects of increasing the expression of the POI polypeptide as well as indirect effects as long as the increased expression of the POI polypeptide encoding nucleic acid results in an enhancement of at least one of the yield related traits. For example overexpression of a transcription factor A may increase transcription of another transcription factor B that in turn controls the expression of a number of genes of a given pathway leading to enhanced biomass or seed yield. Although transcription factor A does not directly enhance the expression of the genes of the pathway leading to enhanced yield-related traits, increased expression of A is the cause for the effect of enhanced yield related-trait(s).

[0014] Hence, it is an object of the invention to provide an expression cassette and a vector construct comprising a nucleic acid encoding a POI polypeptide, operably linked to a beneficial promoter sequence. The use of such genetic constructs for making a transgenic plant having one or more enhanced yield-related traits, preferably increased biomass, relative to control plants is provided.

[0015] Also a preferred embodiment are transgenic plants transformed with one or more expression cassettes of the invention, and thus, expressing in a particular way the nucleic acids encoding a POI protein, wherein the plants have one or more enhanced yield-related trait. Harvestable parts of the transgenic plants of the present invention and products derived from the transgenic plants and their harvestable parts are also part of the present invention.

### DETAILED DESCRIPTION OF THE INVENTION

[0016] The present invention shows that Increasing expression in a plant of a nucleic acid encoding a POI polypeptide gives plants having one or more enhanced yield-related traits relative to control plants.

[0017] According to a first embodiment, the present invention provides a method for enhancing one or more yield-related traits in plants relative to control plants, comprising Increasing expression in a plant of a nucleic acid encoding a POI polypeptide and optionally selecting for plants having one or more enhanced yield-related traits. According to another embodiment, the present invention provides a method for producing plants having one or more enhanced yield-related traits relative to control plants, wherein said method comprises the steps of Increasing expression in said plant of a nucleic acid encoding a POI polypeptide as described herein and optionally selecting for plants having one or more enhanced yield-related traits.

[0018] A preferred method for Increasing expression of a nucleic acid encoding a POI polypeptide is by introducing and expressing in a plant a nucleic acid encoding a POI polypeptide.

[0019] Any reference hereinafter to a “protein useful in the methods of the invention” is taken to mean a POI polypeptide as defined herein. Any reference hereinafter to a “nucleic acid useful in the methods of the invention” is taken to mean a nucleic acid capable of encoding such a POI polypeptide. In one embodiment any reference to a protein or nucleic acid “useful in the methods of the invention” is to be understood to mean proteins or nucleic acids “useful in the methods, constructs, plants, harvestable parts and products of the invention”. The nucleic acid to be introduced into a plant (and therefore useful in performing the methods of the invention) is any nucleic acid encoding the type of protein which will now be described, hereafter also named “POI nucleic acid” or “POI gene”. The POI gene is encoding a chaperone-like polypeptide.

[0020] A “POI polypeptide” as defined herein refers to any chaperone-like polypeptide (CLP) preferably a double Clp-N motif-containing P-loop nucleoside triphosphate hydrolases superfamily protein, more preferably comprising the Interpro motifs IPR004176 (Clp, N-terminal) and/or IPR023150 (Double Clp-N motif), preferably both. In a preferred embodiment the POI polypeptide refers to a CLP polypeptide comprising in addition ATP-dependent protease activity. In another preferred embodiment the CLP polypeptide comprises a PFAM domain PF02861 when analysed with the Interproscan software (see example 4 for details on this software), and even more preferably comprises the PFAM domain PF02861 as a split domain in the CLP wherein the N-terminal part of the PFAM domain PF02861 finds a match at or near the N-terminus, preferably starting within in order of preference 100, 90, 80, 70, 60, 55, 50, 45, 40, 35, 30, 29, 28, 27, 26, 25, 24, 23, 22, 21, 20, 19, 18, 17, 16, 15, 14, 13, 12, 11, 10, 9, 8, 7, 6, 5, 4, 3, 2 or 1 amino acid of the N-terminus of the CLP polypeptide, and the C-terminal part of the PFAM domain PF02861 finds a match C-terminally of this, wherein both matching amino acid stretches are located in the N-terminal half, preferably in the N-terminal quarter of the CLP polypeptide. In one embodiment, the N-terminal part of the split PFAM domain matches the amino acid residues of the CLP polypeptide starting from residue 20, 21, 22, 23, 24, 25, 26, 27, 28, 29 or 30 of the CLP polypeptide, preferably from residue 23 or 24, most preferably from amino acid residue 24 when any pre-sequence, N-terminal tag, signal peptide or transit peptide to the CLP polypeptide is ignored.

[0021] In another preferred embodiment the CLP polypeptide comprises the Interpro motifs IPR004176 (Clp, N-terminal) and/or IPR023150 (Double Clp-N motif), preferably both, and the PFAM domain PF02861, but does not comprise a PFAM domain PF00004 (abbreviated as AAA and/or does not comprise the PFAM domain PF07724 (abbreviated as AAA_{—}2), preferably when analysed with the InterProScan software (InterProScan v4.8 & the InterPro database release 41.0, 13 Feb. 2013).

[0022] In one embodiment the CLP polypeptide is suitable to form a protein complex of protease activity of EC 3.4.21.92 with endogenous polypeptides when expressed in a plant host cell, but the CLP polypeptide does not itself possess the enzyme activity of EC 3.4.21.

[0023] In a further preferred embodiment, the CLP polypeptide comprises the Interpro motifs IPR004176 (Clp, N-terminal) and/or IPR023150 (Double Clp-N motif), preferably both, and the PFAM domain PF02861 in the N-terminal part of the CLP polypeptitde as described herein preferably when analysed with the InterProScan software (InterProScan v4.8 & the InterPro database release 41.0, 13 Feb. 2013), and in the part following the PFAM domain PF02861 towards the C-terminus the polypeptide chain up to (i.e. including) the C-terminus contains more—by number—of amino acids with acidic side chains than amino acids with basic side chains and/or contains at least 30% by number, i.e. per 100 amino acids of the CLP polypeptide, preferably at least 35%, 40%, 44%, 45%, 46%, 47%, 48% or 49% by number of aliphatic and aliphatic hydroxyl amino acids, wherein aliphatic amino acids are those with the single letter code G, A, V, L and I, and aliphatic hydroxyl amino acids are Serine and threonine. Preferably these may be determined using the Sequence Manipulation Suite (Stothard P (2000) The Sequence Manipulation Suite: JavaScript programs for analyzing and formatting protein and DNA sequences. Biotechniques 28:1102-1104)

[0024] More preferably, Serine and Threonine make up at least 10%, 12%, 13%, 14% or 15% by number of the amino acids of the CLP polypeptide chain following the PF02861 domain towards and up to the C-terminus. Preferably these may be determined using the Sequence Manipulation Suite (Stothard P (2000) The Sequence Manipulation Suite: JavaScript programs for analyzing and formatting protein and DNA sequences. Biotechniques 28:1102-1104). In yet another preferred embodiment said part of the CLP polypeptide chain following the PF02861 domain towards and up to the C-terminus is an acidic amino acid chain, i.e. it has an isoelectric point value (pI) of below 7.0, preferably equal to or less than 6.0, more preferably equal to or less than 5.5 when analyzed separately from the N-terminal part containing the PF02861 domain. Various techniques and tools are available in the art to determine the pI value of a given polypeptide chain. In one embodiment, the pI value is determined using the Sequence Manipulation Suite (Stothard P (2000) The Sequence Manipulation Suite: JavaScript programs for analyzing and formatting protein and DNA sequences. Biotechniques 28:1102-1104).

[0025] In one embodiment the nucleic acid sequences employed in the methods, constructs, plants, harvestable parts and products of the invention are sequences encoding CLP polypeptides but excluding those nucleic acids encoding the polypeptide sequences disclosed in the patent application U.S. Ser. No. 11/879,787 published on Apr. 16, 2009 as US2009/100536 with the first inventor being Thomas Adams, as SEQ ID NO: 425, 426 or 427 and/or the polypeptide disclosed as Q9SVD0 in the UniProt database (available from EMBL European Bioinformatics Institute, EMBL-EBI, Wellcome Trust Genome Campus, Hinxton, Cambridge, CB10 1SD, UK; and http://www.ebi.ac.uk/uniprot/)

[0026] According one embodiment, there is provided a method for improving yield-related traits as provided herein in plants relative to control plants, comprising Increasing expression in a plant of a nucleic acid encoding a CLP polypeptide as defined herein. Preferably said one or more enhanced yield-related traits comprise increased yield relative to control plants, and preferably comprise increased biomass and/or increased seed yield relative to control plants, and preferably comprise increased aboveground biomass, increased below-ground biomass, increased seed yield and/or increased sugar yield (either as harvestable sugar per plant, per fresh weight, per dry weight or per area) relative to control plants.

[0027] In one embodiment the nucleic acid sequences employed in the methods, constructs, plants, harvestable parts and products of the invention are nucleic acid molecule selected from the group consisting of:
[0028] (i) a nucleic acid represented by SEQ ID NO: 1, 86, 88, 90, 92, 94, 96, 98, 100, 102 or 104, preferably SEQ ID NO: 1;
[0029] (ii) the complement of a nucleic acid represented by SEQ ID NO: 1, 86, 88, 90, 92, 94, 96, 98, 100, 102 or 104, preferably SEQ ID NO: 1;
[0030] (iii) a nucleic acid encoding a CLP polypeptide having in increasing order of preference at least 35%, 40%, 45%, 50%, 51%, 52%, 53%, 54%, 55%, 56%, 57%, 58%, 59%, 60%, 61%, 62%, 63%, 64%, 65%, 66%, 67%, 68%, 69%, 70%, 71%, 72%, 73%, 74%, 75%, 76%, 77%, 78%, 79%, 80%, 81%, 82%, 83%, 84%, 85%, 86%, 87%, 88%, 89%, 90%, 91%, 92%, 93%, 94%, 95%, 96%, 97%, 98%, or 99% sequence identity to the amino acid sequence represented by SEQ ID NO: 2, 87, 89, 91, 93, 95, 97, 99, 101, 103 or 105, preferably SEQ ID NO: 2, and additionally or alternatively comprising one or more motifs having in increasing order of preference at least 50%, 55%, 60%, 65%, 70%, 75%, 80%, 85%, 90%, 95%, 96%, 97%, 98%, 99% or more sequence identity to any one or more of the motifs given in SEQ ID NO: 76 to SEQ ID NO: 81 and/or one or more of the consensus motifs 1 to 3 as defined above (SEQ ID NO: 83 to 85), and further preferably conferring one or more enhanced yield-related traits relative to controt plants; and
[0031] (iv) a nucleic acid molecule which hybridizes with a nucleic acid molecule of (i) to (iii) under high stringency hybridization conditions and preferably confers one or more enhanced yield-related traits relative to control plants;

[0032] Or encoding a polypeptide selected from the group consisting of:
[0033] (i) an amino acid sequence represented by SEQ ID NO: 2, 87, 89, 91, 93, 95, 97, 99, 101, 103 or 105, preferably SEQ ID NO: 2;
[0034] (ii) an amino acid sequence having, in increasing order of preference, at least 35%, 40%, 45%, 50%, 51%, 52%, 53%, 54%, 55%, 56%, 57%, 58%, 59%, 60%, 61%, 62%, 63%, 64%, 65%, 66%, 67%, 68%, 69%, 70%, 71%, 72%, 73%, 74%, 75%, 76%, 77%, 78%, 79%, 80%, 81%, 82%, 83%, 84%, 85%, 86%, 87%, 88%, 89%, 90%, 91%, 92%, 93%, 94%, 95%, 96%, 97%, 98%, or 99% sequence identity to the amino acid sequence represented by SEQ ID NO: 2, 87, 89, 91, 93, 95, 97, 99, 101, 103 or 105, preferably SEQ ID NO: 2, and additionally or alternatively comprising one or more motifs having in increasing order of preference at least 50%, 55%, 60%, 65%, 70%, 75%, 80%, 85%, 90%, 95%, 96%, 97%, 98%, 99% or more sequence identity to any one or more of the motifs given in SEQ ID NO: 76 to SEQ ID NO: 81 and/or one or more of the consensus motifs 1 to 3 as defined above (SEQ ID NO: 83 to 85), and further preferably conferring one or more enhanced yield-related traits relative to control plants; and
[0035] (iii) derivatives of any of the amino acid sequences given in (i) or (ii) above.

[0036] Preferably the polypeptide comprises one or more motifs and/or domains as defined elsewhere herein.

[0037] The consensus sequence was derived using an alignment as shown in FIG. 2 and example 2 and deducing the consensus sequence.

[0038] In one embodiment the CLP polypeptide comprises the consensus sequence as given in SEQ ID NO: 75.

[0039] Motifs 1 to 6 as shown herein below were generated as described in examples 2 and 4.

[0040] In a further embodiment, the CLP polypeptide as used herein comprises at least one of the motifs 1, 2, 3, 4, 5 or 6 as defined herein below, wherein in the letter-numbers combination

−x(a,b)-

of any motif the letter x stands for Xaa, i.e. any amino acid, and the integer numbers a and b give the minimum and the maximum number of Xaa that may be found after the amino acid preceding the x. For example, S-x(0,3)-P indicates that following the amino acid Serine either one, two or three amino acids of any choice may be included before a Proline residue, or that no amino acid is to be found between the Serine and the Proline residue of this motif.

[0041] Consequently, the letters

−x(2)

indicate that exactly two amino acids of any type are found at this position of the motif. A single −x without a number in brackets—indicates that one amino acid residue of any type is present at this position of the motif.

[0042] Moreover any amino acid residue(s) replacing −x may be identical to or different from the amino acid residue preceding or succeeding it, or any other amino acid inserted instead of the −x at the same or any other position.

[0043] Residues within square brackets represent alternatives.

[0044] In a preferred embodiment the POI polypeptide comprises
[0045] 1) all of the following motifs:

Motif 1 (SEQ ID NO: 76):
A-[AGLV]-K-x(0,2)-I-x(1,3)-Q-L-[IMV]-[IV]-S-I-L-
[DH]-D-P-S-V-S-R-V-M-R-[DE]-A-[DG]-F-[NS]-S-[PST]-
x-[LV]-[KR]-[ANST]-x-[IV]-E-x-[AE];
Motif 2 (SEQ ID NO: 77):
F-x-E-x-[NST]-[ADEST]-E-N-L-x(2)-L-[CS]-x-A-L-
x(2)-[EKR]-x-[PST];
Motif 3 (SEQ ID NO: 78):
T-W-[FLM]-[FL]-F-x-G-x-[DGN]-x(2)-[ADG]-[KR]-x(2)-
[IMV]-[ACS]-x-E-L-A-x-[LV]-V-F-G-S-x(3)-[FV]-x-
[ACST]-x(3)-[ADGS]-[ADEGNST];
Motif 4 (SEQ ID NO: 79):
G-x(1,2)-V-x(0,1)-L-x-[LV]-[EG]-D-L-x-[WY]-x(2)-
[DE]-x(2)-[AST];
Motif 5 (SEQ ID NO: 80):
E-x(0,4)-L-x-[PT]-[FILV]-[ATV]-[IV]-P-[ADV]-[GST]
and
Motif 6 (SEQ ID NO: 81):
L-x-D-[AST]-I-[IV]-[IV]-x-[CGNS]-x-[AEQ];

[0046] or
[0047] 2) the motifs according to 1) and in addition the consensus sequence as represented by the sequence listed under SEQ ID NO: 75; or
[0048] 3) the motifs according to 1) or 2) above and in addition comprising all of the following consensus motifs

Consensus motif 1 (SEQ ID NO: 83):
HPLQC[KR]ALELCF[NS]VA
Consensus motif 2 (SEQ ID NO: 84):
NAL[GV]AA[LF]KRAQAHQR
and
Consensus motif 3 (SEQ ID NO: 85)
LDDPSVSRVMREA[GS]F;

[0049] or
[0050] 4) any 5 of the motifs listed under 1) and all three consensus motifs listed under 3); or
[0051] 5) any 4 of the motifs listed under 1) and all three consensus motifs listed under 3); or
[0052] 6) any 4 of the motifs listed under 1) and any one of the consensus motifs listed under 3); or
[0053] 7) any 3 of the motifs listed under 1); or
[0054] 8) any one or more of the domains listed in Table B1 or table B2 herein; or
[0055] 9) all of the motifs listed under 1) above, all three consensus motifs as listed under 3) above and in addition the Interpro motifs IPR004176 (Clp, N-terminal) and IPR023150 (Double Clp-N motif) and also the PFAM domain PF02861 as a split domain as described herein above and optionally any other domain(s) from the ones listed in table B2 herein; or
[0056] 10) One of the motifs as described herein above.

[0057] In still another embodiment, the CLP polypeptide comprises in increasing order of preference, at least 2, at least 3, at least 4, at least 5 or all 6 motifs in addition to the consensus sequence as defined above.

[0058] Additionally or alternatively, the CLP protein has in increasing order of preference at least 25%, 26%, 27%, 28%, 29%, 30%, 31%, 32%, 33%, 34%, 35%, 36%, 37%, 38%, 39%, 40%, 41%, 42%, 43%, 44%, 45%, 46%, 47%, 48%, 49%, 50%, 51%, 52%, 53%, 54%, 55%, 56%, 57%, 58%, 59%, 60%, 61%, 62%, 63%, 64%, 65%, 66%, 67%, 68%, 69%, 70%, 71%, 72%, 73%, 74%, 75%, 76%, 77%, 78%, 79%, 80%, 81%, 82%, 83%, 84%, 85%, 86%, 87%, 88%, 89%, 90%, 91%, 92%, 93%, 94%, 95%, 96%, 97%, 98%, or 99% overall sequence identity to the amino acid sequence represented by SEQ ID NO: 2, 87, 89, 91, 93, 95, 97, 99, 101, 103 or 105, preferably SEQ ID NO: 2, provided that the homologous protein comprises any one or more of the conserved motifs as outlined above. The overall sequence identity is determined using a global alignment algorithm, such as the Needleman Wunsch algorithm in the program GAP (GCG Wisconsin Package, Accelrys), preferably with default parameters and preferably with sequences of mature proteins (i.e. without taking into account secretion signals or transit peptides). In one embodiment the sequence identity level is determined by comparison of the polypeptide sequences over the entire length of the sequence of SEQ ID NO: 2, 87, 89, 91, 93, 95, 97, 99, 101, 103 or 105, preferably SEQ ID NO: 2. In another embodiment the sequence identity level of a nucleic acid sequence is determined by comparison of the nucleic acid sequence over the entire length of the coding sequence of the sequence of SEQ ID NO: 1, 86, 88, 90, 92, 94, 96, 98, 100, 102 or 104, preferably SEQ ID NO: 1.

[0059] In another embodiment, the sequence identity level is determined by comparison of one or more conserved domains or motifs in SEQ ID NO: 2, 87, 89, 91, 93, 95, 97, 99, 101, 103 or 105, preferably SEQ ID NO: 2 with corresponding conserved domains or motifs in other CLP polypeptides. Compared to overall sequence identity, the sequence identity will generally be higher when only conserved domains or motifs are considered. Preferably the motifs in a CLP polypeptide have, in increasing order of preference, at least 70%, 71%, 72%, 73%, 74%, 75%, 76%, 77%, 78%, 79%, 80%, 81%, 82%, 83%, 84%, 85%, 86%, 87%, 88%, 89%, 90%, 91%, 92%, 93%, 94%, 95%, 96%, 97%, 98%, or 99% sequence identity to any one or more of the motifs represented by SEQ ID NO: 76 to SEQ ID NO: 81 (Motifs 1 to 6), one or more of the consensus motifs 1 to 3 as defined above (SEQ ID NO: 83 to 85) and/or the consensus sequence as represented by SEQ ID NO: 75. In other words, in another embodiment a method for enhancing one or more yield-related traits in plants is provided wherein said CLP polypeptide comprises a conserved domain with at least 70%, 71%, 72%, 73%, 74%, 75%, 76%, 77%, 78%, 79%, 80%, 81%, 82%, 83%, 84%, 85%, 86%, 87%, 88%, 89%, 90%, 91%, 92%, 93%, 94%, 95%, 96%, 97%, 98%, or 99% sequence identity to the conserved domain starting with amino acid 11 up to amino acid 166 in SEQ ID NO:2.

[0060] The terms “domain”, “signature” and “motif” are defined in the “definitions” section herein.

[0061] Preferably, the polypeptide sequence which when used in the construction of a phylogenetic tree, such as the one depicted in FIG. 5, clusters with the group of CLP polypeptides comprising the amino acid sequence represented by SEQ ID NO: 2, 87, 89, 91, 93, 95, 97, 99, 101, 103 or 105, preferably SEQ ID NO: 2 rather than with any other group.

[0062] In another embodiment the polypeptides of the invention when used in the construction of a phylogenetic tree, such as the one depicted in FIG. 3 cluster not more than 4, 3, or 2 hierarchical branch points away from the amino acid sequence of SEQ ID NO: 2, 87, 89, 91, 93, 95, 97, 99, 101, 103 or 105, preferably SEQ ID NO: 2.

[0063] In one embodiment, CLP polypeptides (at least in their native form) typically possess ATP binding and/or possess or contribute to ATP-dependent protease activity. Tools and techniques for measuring ATP binding or ATP-dependent protease activity are well known in the art. In addition, nucleic acids encoding CLP polypeptides, when expressed in rice according to the methods of the present invention as outlined in Examples 7 and 9, give plants having increased yield related traits under normal or drought conditions, in particular increased aboveground biomass, increased height of the centre of gravity of the plant and particularly increased seed yield. Another function of the nucleic acid sequences encoding CLP polypeptides is to confer information for synthesis of the CLP protein that increases yield or yield related traits as described herein, when such a nucleic acid sequence of the invention is transcribed and translated in a living plant cell.

[0064] The present invention is illustrated by transforming plants with the nucleic acid sequence represented by SEQ ID NO: 1, encoding the polypeptide sequence of SEQ ID NO: 2. However, performance of the invention is not restricted to these sequences; the methods of the invention may advantageously be performed using any CLP-encoding nucleic acid or CLP polypeptide as defined herein. The term “CLP” or “CLP polypeptide” as used herein also intends to include homologues as defined hereunder of SEQ ID NO: 2.

[0065] Examples of nucleic acids encoding CLP polypeptides are given in Table A of the Examples section herein. Such nucleic acids are useful in performing the methods of the invention. The amino acid sequences given in Table A of the Examples section are example sequences of orthologues and paralogues of the CLP polypeptide represented by SEQ ID NO: 2, the terms “orthologues” and “paralogues” being as defined herein. Further orthologues and paralogues may readily be identified by performing a so-called reciprocal blast search as described in the definitions section; where the query sequence is SEQ ID NO: 1, 86, 88, 90, 92, 94, 96, 98, 100, 102 or 104, preferably SEQ ID NO: 1 or SEQ ID NO: 2, 87, 89, 91, 93, 95, 97, 99, 101, 103 or 105, preferably SEQ ID NO: 2, the second BLAST (back-BLAST) would be against tomato sequences.

[0066] With respect to the sequences of the invention or useful in the methods, constructs, plants, harvestable parts and products of the invention, in one embodiment a nucleic acid or a polypeptide sequence originating not from higher plants is used in the methods of the invention or the expression construct useful in the methods of the invention. In another embodiment a nucleic acid or a polypeptide sequence of plant origin is used in the methods, constructs, plants, harvestable parts and products of the invention because said nucleic acid and polypeptides has the characteristic of a codon usage optimised for expression in plants, and of the use of amino acids and regulatory sites common in plants, respectively. The plant of origin may be any plant, but preferably those plants as described herein. In yet another embodiment a nucleic acid sequence originating not from higher plants but artificially altered to have the codon usage of higher plants is used in the expression construct useful in the methods of the invention.

[0067] The invention also provides hitherto unknown CLP-encoding nucleic acids and CLP polypeptides useful for conferring one or more enhanced yield-related traits in plants relative to control plants.

[0068] According to a further embodiment of the present invention, there is therefore provided an isolated nucleic acid molecule selected from the group consisting of:
[0069] (i) a nucleic acid represented by any SEQ ID NO shown in table A;
[0070] (ii) the complement of a nucleic acid represented by any SEQ ID NO shown in table A; (iii) a nucleic acid encoding a CLP polypeptide having in increasing order of preference at least 50%, 51%, 52%, 53%, 54%, 55%, 56%, 57%, 58%, 59%, 60%, 61%, 62%, 63%, 64%, 65%, 66%, 67%, 68%, 69%, 70%, 71%, 72%, 73%, 74%, 75%, 76%, 77%, 78%, 79%, 80%, 81%, 82%, 83%, 84%, 85%, 86%, 87%, 88%, 89%, 90%, 91%, 92%, 93%, 94%, 95%, 96%, 97%, 98%, or 99% sequence identity to any amino acid sequence of table A and additionally or alternatively comprising one or more motifs having in increasing order of preference at least 50%, 55%, 60%, 65%, 70%, 75%, 80%, 85%, 90%, 95%, 96%, 97%, 98%, 99% or more sequence identity to any one or more of the motifs given in SEQ ID NO: 76 to SEQ ID NO: 81 and/or one or more of the consensus motifs 1 to 3 as defined above (SEQ ID NO: 83 to 85), and further preferably conferring one or more enhanced yield-related traits relative to control plants; and
[0071] (iv) a nucleic acid molecule which hybridizes with a nucleic acid molecule of (i) to (iii) under high stringency hybridization conditions and preferably confers one or more enhanced yield-related traits relative to control plants.

[0072] According to a further embodiment of the present invention, there is also provided an isolated polypeptide selected from the group consisting of:
[0073] (i) an amino acid sequence represented by any SEQ ID NO shown in table A;
[0074] (ii) an amino acid sequence having, in increasing order of preference, at least 50%, 51%, 52%, 53%, 54%, 55%, 56%, 57%, 58%, 59%, 60%, 61%, 62%, 63%, 64%, 65%, 66%, 67%, 68%, 69%, 70%, 71%, 72%, 73%, 74%, 75%, 76%, 77%, 78%, 79%, 80%, 81%, 82%, 83%, 84%, 85%, 86%, 87%, 88%, 89%, 90%, 91%, 92%, 93%, 94%, 95%, 96%, 97%, 98%, or 99% sequence identity to the amino acid sequence represented by any SEQ ID NO shown in table A, and additionally or alternatively comprising one or more motifs having in increasing order of preference at least 50%, 55%, 60%, 65%, 70%, 75%, 80%, 85%, 90%, 95%, 96%, 97%, 98%, 99%, or more sequence identity to any one or more of the motifs given in SEQ ID NO: 76 to SEQ ID NO: 81 and/or one or more of the consensus motifs 1 to 3 as defined above (SEQ ID NO: 83 to 85), and further preferably conferring one or more enhanced yield-related traits relative to control plants; and
[0075] (iii) derivatives of any of the amino acid sequences given in (i) or (ii) above.

[0076] In one embodiment the nucleic acids useful in the methods of the invention are those listed in Tables I as lead or homologue, or those encoding the protein sequences listed in tables II as lead or homologues, or those comprising the consensus sequence and the patterns shown in table IV.

[0077] Nucleic acid variants may also be useful in practising the methods of the invention. Examples of such variants include nucleic acids encoding homologues and derivatives of any one of the amino acid sequences given in Table A of the Examples section, the terms “homologue” and “derivative” being as defined herein. Also useful in the methods, constructs, plants, harvestable parts and products of the invention are nucleic acids encoding homologues and derivatives of orthologues or paralogues of any one of the amino acid sequences given in Table A of the Examples section. Homologues and derivatives useful in the methods of the present invention have substantially the same biological and functional activity as the unmodified protein from which they are derived. Further variants useful in practising the methods of the invention are variants in which codon usage is optimised or in which miRNA target sites are removed.

[0078] Further nucleic acid variants useful in practising the methods of the invention include portions of nucleic acids encoding CLP polypeptides, nucleic acids hybridising to nucleic acids encoding CLP polypeptides, splice variants of nucleic acids encoding CLP polypeptides, allelic variants of nucleic acids encoding CLP polypeptides and variants of nucleic acids encoding CLP polypeptides obtained by gene shuffling. The terms hybridising sequence, splice variant, allelic variant and gene shuffling are as described herein.

[0079] Nucleic acids encoding CLP polypeptides need not be full-length nucleic acids, since performance of the methods of the invention does not rely on the use of full-length nucleic acid sequences. According to the present invention, there is provided a method for enhancing one or more yield-related traits in plants, comprising introducing, preferably by recombinant methods, and expressing in a plant a portion of any one of the nucleic acid sequences given in Table A of the Examples section, or a portion of a nucleic acid encoding an orthologue, paralogue or homologue of any of the amino acid sequences given in Table A of the Examples section.

[0080] A portion of a nucleic acid may be prepared, for example, by making one or more deletions to the nucleic acid. The portions may be used in isolated form or they may be fused to other coding (or non-coding) sequences in order to, for example, produce a protein that combines several activities. When fused to other coding sequences, the resultant polypeptide produced upon translation may be bigger than that predicted for the protein portion.

[0081] Portions useful in the methods, constructs, plants, harvestable parts and products of the invention, encode a CLP polypeptide as defined herein or at least part thereof, and have substantially the same biological activity as the amino acid sequences given in Table A of the Examples section. Preferably, the portion is a portion of any one of the nucleic acids given in Table A of the Examples section, or is a portion of a nucleic acid encoding an orthologue or paralogue of any one of the amino acid sequences given in Table A of the Examples section. Preferably the portion is at least 500, 550, 600, 650, 700, 750, 800, 850, 900, 950, 1000, 1050, 1100, 1150, 1200, 1250, 1300, 1350, 1400, 1450, 1500, 1550, 1600, 1650, 1700, 1750, 1800, 1850, 1900, 1950, 2000, 2050, 2100, 2150, 2200, 2250, 2300, 2350, 2400 or 2048 consecutive nucleotides in length, the consecutive nucleotides being of any one of the nucleic acid sequences given in Table A of the Examples section, or of a nucleic acid encoding an orthologue or paralogue of any one of the amino acid sequences given in Table A of the Examples section. Most preferably the portion is a portion of the nucleic acid of SEQ ID NO: 1, 86, 88, 90, 92, 94, 96, 98, 100, 102 or 104, preferably SEQ ID NO: 1. Preferably, the portion encodes a fragment of an amino acid sequence which comprises motifs 1 to 6, and more preferably in addition the consensus motifs 1 to 3 and the consensus sequence as defined herein above and/or has biological activity of ATP-dependent protease, and/or has at least 50%, 60%, 70%, 75%, 80%, 85%, 90%, 93%, 95%, 97% or 99% sequence identity to SEQ ID NO: 2, 87, 89, 91, 93, 95, 97, 99, 101, 103 or 105, preferably SEQ ID NO: 2.

[0082] Another nucleic acid variant useful in the methods, constructs, plants, harvestable parts and products of the invention is a nucleic acid capable of hybridising, under reduced stringency conditions, preferably under stringent conditions, with a nucleic acid encoding a CLP polypeptide as defined herein, or with a portion as defined herein. According to the present invention, there is provided a method for enhancing one or more yield-related traits in plants, comprising introducing, preferably by recombinant methods, and expressing in a plant a nucleic acid capable of hybridizing to the complement of a nucleic acid encoding any one of the proteins given in Table A of the Examples section, or to the complement of a nucleic acid encoding an orthologue, paralogue or homologue of any one of the proteins given in Table A.

[0083] Hybridising sequences useful in the methods, constructs, plants, harvestable parts and products of the invention encode a CLP polypeptide as defined herein, having substantially the same biological activity as the amino acid sequences given in Table A of the Examples section. Preferably, the hybridising sequence is capable of hybridising to the complement of a nucleic acid encoding any one of the proteins given in Table A of the Examples section, or to a portion of any of these sequences, a portion being as defined herein, or the hybridising sequence is capable of hybridising to the complement of a nucleic acid encoding an orthologue or paralogue of any one of the amino acid sequences given in Table A of the Examples section. Most preferably, the hybridising sequence is capable of hybridising to the complement of a nucleic acid encoding the polypeptide as represented by SEQ ID NO: 2, 87, 89, 91, 93, 95, 97, 99, 101, 103 or 105, preferably SEQ ID NO: 2 or to a portion thereof. In one embodiment, the hybridization conditions are of medium stringency, preferably of high stringency, as defined herein.

[0084] Preferably, the hybridising sequence encodes a polypeptide with an amino acid sequence which comprises motifs 1 to 6, and more preferably the consensus motifs 1 to 3 and the consensus sequence as defined herein above and/or has biological activity of ATP-dependent protease, and/or has at least 50%, 60%, 70%, 75%, 80%, 85%, 90%, 93%, 95%, 97% or 99% sequence identity to SEQ ID NO: 2, 87, 89, 91, 93, 95, 97, 99, 101, 103 or 105, preferably SEQ ID NO: 2.

[0085] In another embodiment, there is provided a method for enhancing one or more yield-related traits in plants, comprising introducing, preferably by recombinant methods, and expressing in a plant a splice variant of a nucleic acid encoding any one of the proteins given in Table A of the Examples section, or a splice variant of a nucleic acid encoding an orthologue, paralogue or homologue of any of the amino acid sequences given in Table A of the Examples section.

[0086] Preferred splice variants are splice variants of a nucleic acid represented by SEQ ID NO: 1, 86, 88, 90, 92, 94, 96, 98, 100, 102 or 104, preferably SEQ ID NO: 1, or a splice variant of a nucleic acid encoding an orthologue or paralogue of SEQ ID NO: 2, 87, 89, 91, 93, 95, 97, 99, 101, 103 or 105, preferably SEQ ID NO: 2. Preferably, the amino acid sequence encoded by the splice variant comprises motifs 1 to 6, and more preferably the consensus motifs 1 to 3 and the consensus sequence as defined herein above and/or has biological activity of ATP-dependent protease, and/or has at least 50%, 60%, 70%, 75%, 80%, 85%, 90%, 93%, 95%, 97% or 99% sequence identity to SEQ ID NO: 2, 87, 89, 91, 93, 95, 97, 99, 101, 103 or 105, preferably SEQ ID NO: 2.

[0087] In yet another embodiment, there is provided a method for enhancing one or more yield-related traits in plants, comprising introducing, preferably by recombinant methods, and expressing in a plant an allelic variant of a nucleic acid encoding any one of the proteins given in Table A of the Examples section, or comprising introducing, preferably by recombinant methods, and expressing in a plant an allelic variant of a nucleic acid encoding an orthologue, paralogue or homologue of any of the amino acid sequences given in Table A of the Examples section.

[0088] The polypeptides encoded by allelic variants useful in the methods of the present invention have substantially the same biological activity as the CLP polypeptide of SEQ ID NO: 2, 87, 89, 91, 93, 95, 97, 99, 101, 103 or 105, preferably SEQ ID NO: 2 and any of the amino acid sequences depicted in Table A of the Examples section. Allelic variants exist in nature, and encompassed within the methods of the present invention is the use of these natural alleles. Preferably, the allelic variant is an allelic variant of SEQ ID NO: 1, 86, 88, 90, 92, 94, 96, 98, 100, 102 or 104, preferably SEQ ID NO: 1 or an allelic variant of a nucleic acid encoding an orthologue or paralogue of SEQ ID NO: 2, 87, 89, 91, 93, 95, 97, 99, 101, 103 or 105, preferably SEQ ID NO: 2. Preferably, the amino acid sequence encoded by the allelic variant comprises motifs 1 to 6, and more preferably the consensus motifs 1 to 3 and the consensus sequence as defined herein above and/or has biological activity of ATP-dependent protease, and/or has at least 50%, 60%, 70%, 75%, 80%, 85%, 90%, 93%, 95%, 97% or 99% sequence identity to SEQ ID NO: 2, 87, 89, 91, 93, 95, 97, 99, 101, 103 or 105, preferably SEQ ID NO: 2.

[0089] In another embodiment the polypeptide sequences useful in the methods, constructs, plants, harvestable parts and products of the invention have substitutions, deletions and/or insertions compared to the sequence of SEQ ID NO: 2, 87, 89, 91, 93, 95, 97, 99, 101, 103 or 105, preferably SEQ ID NO: 2, wherein the amino acid substitutions, insertions and/or deletions may range from 1 to 10 amino acids each.

[0090] In yet another embodiment, there is provided a method for enhancing one or more yield-related traits in plants, comprising introducing, preferably by recombinant methods, and expressing in a plant a variant of a nucleic acid encoding any one of the proteins given in Table A of the Examples section, or comprising introducing, preferably by recombinant methods, and expressing in a plant a variant of a nucleic acid encoding an orthologue, paralogue or homologue of any of the amino acid sequences given in Table A of the Examples section, which variant nucleic acid is obtained by gene shuffling.

[0091] Preferably, the amino acid sequence encoded by the variant nucleic acid obtained by gene shuffling comprises motifs 1 to 6, and more preferably the consensus motifs 1 to 3 and the consensus sequence as defined herein above and/or has biological activity of ATP-dependent protease, and/or has at least 50%, 60%, 70%, 75%, 80%, 85%, 90%, 93%, 95%, 97% or 99% sequence identity to SEQ ID NO: 2, 87, 89, 91, 93, 95, 97, 99, 101, 103 or 105, preferably SEQ ID NO: 2.

[0092] Furthermore, nucleic acid variants may also be obtained by site-directed mutagenesis. Several methods are available to achieve site-directed mutagenesis, the most common being PCR based methods (Current Protocols in Molecular Biology. Wiley Eds.). CLP polypeptides differing from the sequence of SEQ ID NO: 2, 87, 89, 91, 93, 95, 97, 99, 101, 103 or 105, preferably SEQ ID NO: 2 by one or several amino acids (substitution(s), insertion(s) and/or deletion(s) as defined herein) may equally be useful to increase the yield of plants in the methods and constructs and plants of the invention.

[0093] Nucleic acids encoding CLP polypeptides may be derived from any natural or artificial source. The nucleic acid may be modified from its native form in composition and/or genomic environment through deliberate human manipulation. Preferably the CLP polypeptide-encoding nucleic acid is from a plant, further preferably from a dicotyledonous plant, more preferably from the family Brassicaceae, most preferably the nucleic acid is from Arabidopsis species, in particular from Arabidopsis thaliana.

[0094] The inventive methods for enhancing one or more yield-related traits in plants as described herein comprising introducing, preferably by recombinant methods, and expressing in a plant the nucleic acid(s) as defined herein, and preferably the further step of growing the plants and optionally the step of harvesting the plants or part(s) thereof.

[0095] In another embodiment the present invention extends to recombinant chromosomal DNA comprising a nucleic acid sequence useful in the methods of the invention, wherein said nucleic acid is present in the chromosomal DNA as a result of recombinant methods, but is not in its natural genetic environment. In a further embodiment the recombinant chromosomal DNA of the invention is comprised in a plant cell. DNA comprised within a cell, particularly a cell with cell walls like a plant cell, is better protected from degradation, damage and/or breakdown than a bare nucleic acid sequence. The same holds true for a DNA construct comprised in a host cell, for example a plant cell.

[0096] In a preferred embodiment the invention relates to compositions comprising the recombinant chromosomal DNA of the invention and/or the construct of the invention, and a host cell, preferably a plant cell, wherein the recombinant chromosomal DNA and/or the construct are comprised within the host cell, preferably within a plant cell or a host cell with a cell wall. In a further embodiment said composition comprises dead host cells, living host cells or a mixture of dead and living host cells, wherein the recombinant chromosomal DNA and/or the construct of the invention may be located in dead host cells and/or living host cell. Optionally the composition may comprise further host cells that do not comprise the recombinant chromosomal DNA of the invention or the construct of the invention. The compositions of the invention may be used in processes of multiplying or distributing the recombinant chromosomal DNA and/or the construct of the invention, and or alternatively to protect the recombinant chromosomal DNA and/or the construct of the invention from breakdown and/or degradation as explained herein above. The recombinant chromosomal DNA of the invention and/or the construct of the invention can be used as a quality marker of the compositions of the invention, as an indicator of origin and/or as an indication of producer.

[0097] In particular, the methods of the present invention may be performed under non-stress conditions. In an example, the methods of the present invention may be performed under non-stress conditions such as mild drought to give plants having increased yield relative to controt plants.

[0098] In another embodiment, the methods of the present invention may be performed under stress conditions, preferably under abiotic stress conditions.

[0099] In an example, the methods of the present invention may be performed under stress conditions such as drought to give plants having increased yield relative to control plants.

[0100] In another example, the methods of the present invention may be performed under stress conditions such as nutrient deficiency to give plants having increased yield relative to control plants.

[0101] Nutrient deficiency may result from a lack of nutrients such as nitrogen, phosphates and other phosphorous-containing compounds, potassium, calcium, magnesium, manganese, iron and boron, amongst others.

[0102] In yet another example, the methods of the present invention may be performed under stress conditions such as salt stress to give plants having increased yield relative to control plants. The term salt stress is not restricted to common salt (NaCl), but may be any one or more of: NaCl, KCl, LiCl, MgCl2, CaCl2, amongst others.

[0103] In yet another example, the methods of the present invention may be performed under stress conditions such as cold stress or freezing stress to give plants having increased yield relative to control plants.

[0104] In a preferred embodiment the methods of the invention are performed using plants in need of increased abiotic stress-tolerance for example tolerance to drought, salinity and/or cold or hot temperatures and/or nutrient use due to one or more nutrient deficiency such as nitrogen deficiency.

[0105] Performance of the methods of the invention gives plants having one or more enhanced yield-related traits. In particular performance of the methods of the invention gives plants having increased early growth and/or increased yield, especially increased biomass and/or increased seed yield relative to control plants. The terms “early vigour” “yield” and “seed yield” are described in more detail in the “definitions” section herein.

[0106] The present invention thus provides a method for increasing yield-related traits, especially biomass and/or seed yield of plants, relative to control plants, which method comprises Increasing expression in a plant of a nucleic acid encoding a CLP polypeptide as defined herein.

[0107] According to a preferred feature of the present invention, performance of the methods of the invention gives plants having an increased growth rate relative to control plants. Therefore, according to the present invention, there is provided a method for increasing the growth rate of plants, which method comprises Increasing expression in a plant of a nucleic acid encoding a CLP polypeptide as defined herein.

[0108] Performance of the methods of the invention gives plants grown under non-stress conditions or under drought conditions increased yield-related traits, preferably biomass and/or seed yield, relative to control plants grown under comparable conditions. Therefore, according to the present invention, there is provided a method for increasing yield-related traits, preferably biomass and/or seed yield, in plants grown under non-stress conditions or under drought conditions, which method comprises Increasing expression in a plant of a nucleic acid encoding a CLP polypeptide.

[0109] Performance of the methods of the invention gives plants grown under conditions of nutrient deficiency, particularly under conditions of nitrogen deficiency, increased yield-related traits relative to control plants grown under comparable conditions. Therefore, according to the present invention, there is provided a method for increasing yield-related traits in plants grown under conditions of nutrient deficiency, which method comprises increasing expression in a plant of a nucleic acid encoding a POI polypeptide.

[0110] Performance of the methods of the invention gives plants grown under conditions of salt stress, increased yield-related traits relative to control plants grown under comparable conditions. Therefore, according to the present invention, there is provided a method for increasing yield-related traits in plants grown under conditions of salt stress, which method comprises increasing expression in a plant of a nucleic acid encoding a POI polypeptide.

[0111] In one embodiment of the invention, root biomass is increased, preferably beet and/or taproot biomass, more preferably in sugar beet plants, and optionally seed yield and/or above ground biomass are not increased.

[0112] In another embodiment of the invention, above ground biomass is increased, preferably stem, stalk and/or sett biomass, more preferably in Poaceae, even more preferably in a Saccharum species, most preferably in sugarcane, and optionally seed yield and/or root growth is not increased.

[0113] In a further embodiment the total harvestable sugar, preferably glucose, fructose and/or sucrose, is increased, preferably in addition to increased other yield-related traits as defined herein, for example biomass, and more preferably also in addition to an increase in sugar content, preferably glucose, fructose and/or sucrose content.

[0114] The invention also provides genetic constructs and vectors to facilitate introduction and/or expression in plants of nucleic acids encoding CLP polypeptides. The gene constructs may be inserted into vectors, which may be commercially available, suitable for transforming into plants or host cells and suitable for expression of the gene of interest in the transformed cells. The invention also provides use of a gene construct as defined herein in the methods of the invention.

[0115] More specifically, the present invention provides a construct comprising:
[0116] (a) an isolated nucleic acid encoding a CLP polypeptide as defined above;
[0117] (b) one or more control sequences capable of driving expression of the nucleic acid sequence of (a); and optionally
[0118] (c) a transcription termination sequence.

[0119] Preferably, the nucleic acid encoding a CLP polypeptide is as defined above. The term “control sequence” and “termination sequence” are as defined herein.

[0120] In particular the genetic construct of the invention is a plant expression construct, i.e. a genetic construct that allows for the expression of the nucleic acid encoding a CLP in a plant, plant cell or plant tissue after the construct has been introduced into this plant, plant cell or plant tissue, preferably by recombinant means. The plant expression construct may for example comprise said nucleic acid encoding a CLP in functional linkage to a promoter and optionally other control sequences controlling the expression of said nucleic acid in one or more plant cells, wherein the promoter and optional the other control sequences are not natively found in functional linkage to said nucleic acid. In a preferred embodiment the control sequence(s) including the promoter result in overexpression of said nucleic acid when the construct of the invention has been introduced into a plant, plant cell or plant tissue.

[0121] The genetic construct of the invention may be comprised in a host cell—for example a plant cell—seed, agricultural product or plant. Plants or host cells are transformed with a genetic construct such as a vector or an expression cassette comprising any of the nucleic acids described above. Thus the invention furthermore provides plants or host cells transformed with a construct as described above. In particular, the invention provides plants transformed with a construct as described above, which plants have increased yield-related traits as described herein.

[0122] In one embodiment the genetic construct of the invention confers increased yield or yield related traits(s) to a plant when it has been introduced into said plant, which plant expresses the nucleic acid encoding the CLP polypeptide comprised in the genetic construct and preferably resulting in increased abundance of the CLP polypeptide. In another embodiment the genetic construct of the invention confers increased yield or yield related traits(s) to a plant comprising plant cells in which the construct has been introduced, which plant cells express the nucleic acid encoding the CLP comprised in the genetic construct.

[0123] The promoter in such a genetic construct may be a non-native promoter to the nucleic acid described above, i.e. a promoter different from the promoterregulating the expression of said nucleic acid in its native surrounding.

[0124] In a preferred embodiment the nucleic acid encoding the CLP polypeptide useful in the methods, constructs, plants, harvestable parts and products of the invention is in functional linkage to a promoter resulting in the expression of said nucleic acid encoding a CLP polypeptide in
[0125] aboveground biomass preferably the leaves and shoot, more preferably the stem, of monocot plants, preferably Poaceae plants, more preferably Saccharum species plants, AND/OR
[0126] leaves, below ground biomass and/or root biomass, preferably tubers, taproots and/or beet organs, more preferably taproot and beet organs of dicot plants, more preferably Solanaceae and/or Beta species plants.

[0127] The expression cassettes or the genetic construct of the invention may be comprised in a host cell, plant cell, seed, agricultural product or plant.

[0128] The skilled artisan is well aware of the genetic elements that must be present on the genetic construct in order to successfully transform, select and propagate host cells containing the sequence of interest. The sequence of interest is operably linked to one or more control sequences (at least to a promoter).

[0129] Advantageously, any type of promoter, whether natural or synthetic, may be used to drive expression of the nucleic acid sequence, but preferably the promoter is of plant origin. A constitutive promoter is particularly useful in the methods. See the “Definitions” section herein for definitions of the various promoter types.

[0130] The constitutive promoter is preferably a ubiquitous constitutive promoter of medium strength. More preferably it is a plant derived promoter, e.g. a promoter of plant chromosomal origin, such as a GOS2 promoter or a promoter of substantially the same strength and having substantially the same expression pattern (a functionally equivalent promoter), more preferably the promoter is the promoter GOS2 promoter from rice. Further preferably the constitutive promoter is represented by a nucleic acid sequence substantially similar to SEQ ID NO: 82, most preferably the constitutive promoter is as represented by SEQ ID NO: 82. See the “Definitions” section herein for further examples of constitutive promoters.

[0131] It should be clear that the applicability of the present invention is not restricted to the CLP polypeptide-encoding nucleic acid represented by SEQ ID NO: 1, nor is the applicability of the invention restricted to the rice GOS2 promoter when expression of a CLP polypeptide-encoding nucleic acid is driven by a constitutive promoter.

[0132] Yet another embodiment relates to genetic constructs useful in the methods, vector constructs, plants, harvestable parts and products of the invention wherein the genetic construct comprises the CLP nucleic acid of the invention functionally linked a promoter as disclosed herein above and further functionally linked to one or more of
[0133] 1) nucleic acid expression enhancing nucleic acids (NEENAs):
   [0134] a) as disclosed in the international patent application published as WO2011/023537 in table 1 on page 27 to page 28 and/or SEQ ID NO: 1 to 19 and/or as defined in items i) to vi) of claim 1 of said international application which NEENAs are herewith incorporated by reference; and/or
   [0135] b) as disclosed in the international patent application published as WO2011/023539 in table 1 on page 27 and/or SEQ ID NO: 1 to 19 and/or as defined in items i) to vi) of claim 1 of said international application which NEENAs are herewith incorporated by reference; and/or
   [0136] c) as contained in or disclosed in:
      [0137] i) the European priority application filed on 5 Jul. 2011 as EP 11172672.5 in table 1 on page 27 and/or SEQ ID NO: 1 to 14937, preferably SEQ ID NO: 1 to 5, 14936 or 14937, and/or as defined in items i) to v) of claim 1 of said European priority application which NEENAs are herewith incorporated by reference; and/or
      [0138] ii) the European priority application filed on 6 Jul. 2011 as EP 11172825.9 in table 1 on page 27 and/or SEQ ID NO: 1 to 65560, preferably SEQ ID NO: 1 to 3, and/or as defined in items i) to v) of claim 1 of said European priority application which NEENAs are herewith incorporated by reference; and/or
   [0139] d) equivalents having substantially the same enhancing effect; and/or
[0140] 2) functionally linked to one or more Reliability Enhancing Nucleic Acid (RENA) molecule
   [0141] a) as contained in or disclosed in the European priority application filed on 15 Sep. 2011 as EP 11181420.8 in table 1 on page 26 and/or SEQ ID NO: 1 to 16 or 94 to 116666, preferably SEQ ID NO: 1 to 16, and/or as defined in point i) to v) of item a) of claim 1 of said European priority application which RENA molecule(s) are herewith incorporated by reference; or
   [0142] b) equivalents having substantially the same enhancing effect.

[0143] A preferred embodiment of the invention relates to a nucleic acid molecule useful in the methods, constructs, plants, harvestable parts and products of the invention and encoding a CLP polypeptide of the invention under the control of a promoter as described herein above, wherein the NEENA, RENA and/or the promoter is heterologous to said nucleic acid molecule encoding a CLP polypeptide of the invention.

[0144] Optionally, one or more terminator sequences may be used in the construct introduced into a plant. Those skilled in the art will be aware of terminator sequences that may be suitable for use in performing the invention. Preferably, the construct comprises an expression cassette comprising a GOS2 promoter, substantially similar to SEQ ID NO: 82, operably linked to the nucleic acid encoding the CLP polypeptide. Furthermore, one or more sequences encoding selectable markers may be present on the construct introduced into a plant.

[0145] According to a preferred feature of the invention, the modulated expression is increased expression. Methods for increasing expression of nucleic acids or genes, or gene products, are well documented in the art and examples are provided in the definitions section.

[0146] As mentioned above, a preferred method for Increasing expression of a nucleic acid encoding a CLP polypeptide is by introducing, preferably by recombinant methods, and expressing in a plant a nucleic acid encoding a CLP polypeptide; however the effects of performing the method, i.e. enhancing one or more yield-related traits may also be achieved using other well-known techniques, including but not limited to T-DNA activation tagging, TILLING, homologous recombination. A description of these techniques is provided in the definitions section.

[0147] The invention also provides a method for the production of transgenic plants having one or more enhanced yield-related traits relative to control plants, comprising introduction and expression in a plant of any nucleic acid encoding a CLP polypeptide as defined herein.

[0148] More specifically, the present invention provides a method for the production of transgenic plants having one or more enhanced yield-related traits, particularly increased biomass, preferably aboveground and/or root biomass, and/or seed yield, which method comprises:
[0149] (i) introducing, preferably by recombinant methods, and expressing in a plant or plant cell a CLP polypeptide-encoding nucleic acid or a genetic construct comprising a CLP polypeptide-encoding nucleic acid; and
[0150] (ii) cultivating the plant cell under conditions promoting plant growth and development; preferably promoting plant growth and development of plants having one or more enhanced yield-related traits relative to control plants.

[0151] Preferably, the introduction of the POI polypeptide-encoding nucleic acid is by recombinant methods.

[0152] The nucleic acid of (i) may be any of the nucleic acids capable of encoding a CLP polypeptide as defined herein.

[0153] Cultivating the plant cell under conditions promoting plant growth and development, may or may not include regeneration and/or growth to maturity. Accordingly, in a particular embodiment of the invention, the plant cell transformed by the method according to the invention is regenerable into a transformed plant. In another particular embodiment, the plant cell transformed by the method according to the invention is not regenerable into a transformed plant, i.e. cells that are not capable to regenerate into a plant using cell culture techniques known in the art. While plants cells generally have the characteristic of totipotency, some plant cells can not be used to regenerate or propagate intact plants from said cells. In one embodiment of the invention the plant cells of the invention are such cells. In another embodiment the plant cells of the invention are plant cells that do not sustain themselves in an autotrophic way. One example are plant cells that do not sustain themselves through photosynthesis by synthesizing carbohydrate and protein from such inorganic substances as water, carbon dioxide and mineral salt.

[0154] The nucleic acid may be introduced directly into a plant cell or into the plant itself (including introduction into a tissue, organ or any other part of a plant). According to a preferred feature of the present invention, the nucleic acid is preferably introduced into a plant or plant cell by transformation. The term “transformation” is described in more detail in the “definitions” section herein.

[0155] In one embodiment the methods of the invention are methods for the production of a transgenic sugarcane Poaceae plant, preferably a Saccharum species plant, a transgenic part thereof, or transgenic plant cell having one or more enhanced yield-related traits relative to control plants, comprises the step of harvesting setts from the transgenic plant and planting the setts and growing the setts to plants, wherein the setts comprises the exogenous nucleic acid encoding the CLP polypeptide and the promoter sequence operably linked thereto.

[0156] In one embodiment the present invention extends to any plant cell or plant produced by any of the methods described herein, and to all plant parts and propagules thereof.

[0157] The present invention encompasses plants or parts thereof (including seeds) obtainable by the methods according to the present invention. The plants or plant parts or plant cells comprise a nucleic acid transgene encoding a CLP polypeptide as defined above, preferably in a genetic construct such as an expression cassette. The present invention extends further to encompass the progeny of a primary transformed or transfected cell, tissue, organ or whole plant that has been produced by any of the aforementioned methods, the only requirement being that progeny exhibit the same genotypic and/or phenotypic characteristic(s) as those produced by the parent in the methods according to the invention.

[0158] In a further embodiment the invention extends to seeds recombinantly comprising the expression cassettes of the invention, the genetic constructs of the invention, or the nucleic acids encoding the CLP and/or the CLP polypeptides as described above. Typically a plant grown from the seed of the invention will also show enhanced yield-related traits.

[0159] The invention also includes host cells containing an isolated nucleic acid encoding a CLP polypeptide as defined above. In one embodiment host cells according to the invention are plant cells, yeasts, bacteria or fungi. Host plants for the nucleic acids, construct, expression cassette or the vector used in the method according to the invention are, in principle, advantageously all plants which are capable of synthesizing the polypeptides used in the inventive method. In a particular embodiment the plant cells of the invention overexpress the nucleic acid molecule of the invention.

[0160] In a further embodiment the invention relates to a transgenic pollen grain comprising the construct of the invention and/or a haploid derivate of the plant cell of the invention. Although in one particular embodiment the pollen grain of the invention can not be used to regenerate an intact plant without adding further genetic material and/or is not capable of photosynthesis, said pollen grain of the invention may have uses in introducing the enhanced yield related trait into another plant by fertilizing an egg cell of the other plant using a live pollen grain of the invention, producing a seed from the fertilized egg cell and growing a plant from the resulting seed. Further pollen grains find use as marker of geographical and/or temporal origin.

[0161] The methods of the invention are advantageously applicable to any plant, in particular to any plant as defined herein. Plants that are particularly useful in the methods of the invention include all plants which belong to the superfamily Viridiplantae, in particular monocotyledonous and dicotyledonous plants including fodder or forage legumes, ornamental plants, food crops, trees or shrubs. According to an embodiment of the present invention, the plant is a crop plant. Examples of crop plants include but are not limited to chicory, carrot, cassava, trefoil, soybean, beet, sugar beet, sunflower, canola, alfalfa, rapeseed, linseed, cotton, tomato, potato, Stevia species such as but not limited to Stevia rebaudiana and tobacco. According to another embodiment of the present invention, the plant is a monocotyledonous plant. Examples of monocotyledonous plants include sugarcane. According to another embodiment of the present invention, the plant is a cereal. Examples of cereals include rice, maize, wheat, barley, millet, rye, triticale, sorghum, emmer, spelt, einkorn, teff, milo and oats. In a particular embodiment the plants of the invention or used in the methods of the invention are selected from the group consisting of maize, wheat, rice, soybean, cotton, oilseed rape including canola, sugarcane, sugar beet and alfalfa. Advantageously the methods of the invention are more efficient than the known methods, because the plants of the invention have increased yield and/or tolerance to an environmental stress compared to control plants used in comparable methods.

[0162] The invention also extends to harvestable parts of a plant such as, but not limited to seeds, leaves, fruits, flowers, stems, setts, roots, rhizomes, tubers and bulbs, which harvestable parts comprise a recombinant nucleic acid encoding a CLP polypeptide as defined herein. In particular, such harvestable parts are roots such as taproots, rhizomes, fruits, stems, beets, tubers, bulbs, leaves, flowers and/or seeds. In one embodiment harvestable parts are stem cuttings (like setts of sugar cane).

[0163] The invention furthermore relates to products derived or produced, preferably directly derived or directly produced, from a one or more harvestable part(s) of such a plant, such as dry pellets, pressed stems, setts, meal or powders, fibres, cloth, paper or cardboard containing fibres produced by the plants of the invention, oil, fat and fatty acids, carbohydrates, —including starches, paper or cardboard containing carbohydrates produced by the plants of the invention—, sap, juice, chaff or proteins. Preferred carbohydrates are starches, cellulose and/or sugars, preferably sucrose. Also preferred products are residual dry fibers, e.g., of the stem (like bagasse from sugar cane after cane juice removal), molasse, or filtercake, preferably from sugar cane. Said products can be agricultural products. In one embodiment the product comprises a recombinant nucleic acid encoding a CLP polypeptide and/or a recombinant CLP polypeptide for example as an indicator of the particular quality of the product. In another embodiment the invention relates to anti-counterfeit milled seed, milled stem and/or milled root having as an indication of origin and/or as an indication of producer a plant cell of the invention and/or the construct of the invention, wherein milled root preferably is milled beet, more preferably milled sugar beet.

[0164] The invention also includes methods for manufacturing a product comprising a) growing the plants of the invention and b) producing said product from or by the plants of the invention or parts thereof, including stem, sett, root, beet and/or seeds. In a further embodiment the methods comprise the steps of a) growing the plants of the invention, b) removing the harvestable parts as described herein from the plants and c) producing said product from, or with the harvestable parts of plants according to the invention.

[0165] In one embodiment the method of the invention is a method for manufacturing cloth by a) growing the plants of the invention that are capable of producing fibres usable in cloth making, e.g. cotton, b) removing the harvestable parts as described herein from the plants, and c) producing fibres from said harvestable part and d) producing cloth from the fibres of c). Another embodiment of the invention relates to a method for producing feedstuff for bioreactors, fermentation processes or biogas plants, comprising a) growing the plants of the invention, b) removing the harvestable parts as described herein from the plants and c) producing feedstuff for bioreactors, fermentation processes or biogas plants. In a preferred embodiment the method of the invention is a method for producing alcohol(s) from plant material comprising a) growing the plants of the invention, b) removing the harvestable parts as described herein from the plants and c) optionally producing feedstuff for fermentation process, and d)—following step b) or c)—producing one or more alcohol(s) from said feedstuff or harvestable parts, preferably by using microorganisms such as fungi, algae, bacteria or yeasts, or cell cultures. A typical example would be the production of ethanol using carbohydrate containing harvestable parts, for example corn seed, sugarcane stem parts or beet parts of sugar beet.

[0166] In one embodiment, the product is produced from the stem of the transgenic plant. In another embodiment the product is produced from the root, preferable taproot and/or beet of the plant.

[0167] In yet another embodiment the method of the invention is a method for the production of one or more polymers comprising a) growing the plants of the invention, b) removing the harvestable parts as described herein from the plants and c) producing one or more monomers from the harvestable parts, optionally involving intermediate products, d) producing one or more pol-ymer(s) by reacting at least one of said monomers with other monomers or reacting said monomer(s) with each other. In another embodiment the method of the invention is a method for the production of a pharmaceutical compound comprising a) growing the plants of the invention, b) removing the harvestable parts as described herein from the plants and c) producing one or more monomers from the harvestable parts, optionally involving intermediate products, d) producing a pharmaceutical compound from the harvestable parts and/or intermediate products. In another embodiment the method of the invention is a method for the production of one or more chemicals comprising a) growing the plants of the invention, b) removing the harvestable parts as described herein from the plants and c) producing one or more chemical building blocks such as but not limited to Acetate, Pyruvate, lactate, fatty acids, sugars, amino acids, nucleotides, carotenoids, terpenoids or steroids from the harvestable parts, optionally involving intermediate products, d) producing one or more chemical(s) by reacting at least one of said building blocks with other building block or reacting said building block(s) with each other.

[0168] The present invention is also directed to a product obtained by a method for manufacturing a product, as described herein. In a further embodiment the products produced by the manufacturing methods of the invention are plant products such as, but not limited to, a foodstuff, feedstuff, a food supplement, feed supplement, fibre, cosmetic or pharmaceutical. In another embodiment the methods for production are used to make agricultural products such as, but not limited to, fibres, plant extracts, meal or presscake and other leftover material after one or more extraction processes, flour, proteins, amino acids, carbohydrates, fats, oils, polymers, vitamins, and the like. Preferred carbohydrates are sugars, preferably sucrose. In one embodiment the agricultural product is selected from the group consisting of 1) fibres, 2) timber, 3) plant extracts, 4) meal or presscake or other leftover material after one or more extraction processes, 5) flour, 6) proteins, 7) carbohydrates, 8) fats, 9) oils, 10) polymers e.g. cellulose, starch, lignin, lignocellulose, and 11) combinations and/or mixtures of any of 1) to 10). In a preferable embodiment the product or agricultural product does generally not comprise living plant cells, does comprise the expression cassette, genetic construct, protein and/or polynucleotide as described herein.

[0169] In yet another embodiment the polynucleotides or the polypeptides or the constructs of the invention are comprised in an agricultural product. In a particular embodiment the nucleic acid sequences and protein sequences of the invention may be used as product markers, for example where an agricultural product was produced by the methods of the invention. Such a marker can be used to identify a product to have been produced by an advantageous process resulting not only in a greater efficiency of the process but also improved quality of the product due to increased quality of the plant material and harvestable parts used in the process. Such markers can be detected by a variety of methods known in the art, for example but not limited to PCR based methods for nucleic acid detection or antibody based methods for protein detection.

[0170] The present invention also encompasses use of nucleic acids encoding CLP polypeptides as described herein and use of these CLP polypeptides in enhancing any of the aforementioned yield-related traits in plants. For example, nucleic acids encoding CLP polypeptide described herein, or the CLP polypeptides themselves, may find use in breeding programmes in which a DNA marker is identified which may be genetically linked to a CLP polypeptide-encoding gene. The nucleic acids/genes, or the CLP polypeptides themselves may be used to define a molecular marker. This DNA or protein marker may then be used in breeding programmes to select plants having one or more enhanced yield-related traits as defined herein in the methods of the invention. Furthermore, allelic variants of a CLP polypeptide-encoding nucleic acid/gene may find use in marker-assisted breeding programmes. Nucleic acids encoding CLP polypeptides may also be used as probes for genetically and physically mapping the genes that they are a part of, and as markers for traits linked to those genes. Such information may be useful in plant breeding in order to develop lines with desired phenotypes.

[0171] In one embodiment, the total storage carbohydrate content of the plants of the invention, or parts thereof and in particular of the harvestable parts of the plant(s) is increased compared to control plant(s) and the corresponding plant parts of the control plants.

[0172] Storage carbohydrates are preferably sugars such as but not limited to sucrose, fructose and glucose, and polysaccharides such as but not limited to starches, glucans and fructans. The total storage carbohydrate content and the content of individual groups or species of carbohydrates may be measured in a number of ways known in the art. For example, the international application published as WO2006066969 discloses in paragraphs [79] to [117] a method to determine the total storage carbohydrate content of sugarcane, including fructan content.

[0173] Another method for sugarcane is as follows:

[0174] The transgenic sugarcane plants are grown for 10 to 15 months, either in the greenhouse or the field. Standard conditions for growth of the plants are used.

[0175] Stalks of sugarcane plants which are 10 to 15 months old and have more than 10 internodes are harvested. After all of the leaves have been removed, the internodes of the stalk are numbered from top (=1) to bottom (for example=36). A stalk disc approximately 1-2 g in weight is excised from the middle of each internode. The stalk discs of 3 internodes are then combined to give one sample and frozen in liquid nitrogen.

[0176] For the sugar extraction, the stalk discs are first comminuted in a Waring blender (from Waring, New Hartford, Conn., USA). The sugars are extracted by shaking for one hour at 95° C. in 10 mM sodium phosphate buffer pH 7.0. Thereafter, the solids are removed by filtration through a 30 μm sieve. The resulting solution is subsequently employed for the sugar determination (see herein below).

[0177] The transgenic sugarcane plants are grown for 10 to 15 months. In each case a sugarcane stalk of the transgenic line and a wild-type sugarcane plant is defoliated, the stalk is divided into segments of 3 internodes, and these internode segments are frozen in liquid nitrogen in a sealed 50 ml plastic container. The fresh weight of the samples is determined. The extraction for the purposes of the sugar determination is done as described below.

[0178] The glucose, fructose and sucrose contents in the extract obtained in accordance with the sugar extraction method described above is determined photometrically in an enzyme assay via the conversion of NAD+ (nicotinamide adenine dinucleotide) into NADH (reduced nicotinamide adenine dinucleotide). During the reduction, the aromatic character at the nicotinamide ring is lost, and the absorption spectrum thus changes. This change in the absorption spectrum can be detected photometrically. The glucose and fructose present in the extract is converted into glucose-6-phosphate and fructose-6-phosphate by means of the enzyme hexokinase and adenosin triphosphate (ATP). The glucose-6-phosphate is subsequently oxidized by the enzyme glucose-6-phosphate dehydrogenase to give 6-phosphogluconate. In this reaction, NAD+ is reduced to give NADH, and the amount of NADH formed is determined photometrically. The ratio between the NADH formed and the glucose present in the extract is 1:1, so that the glucose content can be calculated from the NADH content using the molar absorption coefficient of NADH (6.3 1 per mmol and per cm lightpath). Following the complete oxidation of glucose-6-phosphate, fructose-6-phosphate, which has likewise formed in the solution, is converted by the enzyme phosphoglucoisomerase to give glucose-6-phosphate which, in turn, is oxidized to give 6-phosphogluconate. Again, the ratio between fructose and the amount of NADH formed is 1:1. Thereafter, the sucrose present in the extract is cleaved by the enzyme sucrase (Megazyme) to give glucose and fructose. The glucose and fructose molecules liberated are then converted with the abovementioned enzymes in the NAD+-dependent reaction to give 6-phosphogluconate. The conversion of one sucrose molecule into 6-phosphogluconate results in two NADH molecules. The amount of NADH formed is likewise determined photometrically and used for calculating the sucrose content, using the molar absorption coefficient of NADH.

[0179] The sugarcane stalks are divided into segments of in each case three internodes, as specified above. The internodes are numbered from top to bottom (top=internode 1, bottom=internode 21).

[0180] Furthermore transgenic sugarcane plants may be analysed using any method known in the art for example but not limited to:
[0181] The Sampling of Sugar Cane by the Full Width Hatch Sampler; ICUMSA (International Commission for Uniform Methods of Sugar Analysis, http://www.icumsa.org/index.php?id=4) Method GS 5-5 (1994) available from Verlag Dr. Albert Bartens K G, Lückhoffstr. 16, 14129 Berlin (http://www.bartens.com/)
[0182] The Sampling of Sugar Cane by the Corer Method; ICUMSA Method GS 5-7 (1994) available from Verlag Dr. Albert Bartens K G, Lückhoffstr. 16, 14129 Berlin (http://www.bartens.com/)
[0183] The Determination of Sucrose by Gas Chromatography in Molasses and Factory Products—Official; and Cane Juice; ICUMSA Method GS 4/7/8/5-2 (2002) available from Verlag Dr. Albert Bartens K G, Lückhoffstr. 16, 14129 Berlin (http://www.bartens.com/)
[0184] The Determination of Sucrose, Glucose and Fructose by HPLC—in Cane Molassesand Sucrose in Beet Molasses; ICUMSA Method GS 7/4/8-23 (2011) available from Verlag Dr. Albert Bartens K G, Lückhoffstr. 16, 14129 Berlin (http://www.bartens.com/)
[0185] The Determination of Glucose, Fructose and Sucrose in Cane Juices, Syrups and Molasses, and of Sucrose in Beet Molasses by High Performance Ion Chromatography; ICUMSA Method GS 7/8/4-24 (2011) available from Verlag Dr. Albert Bartens K G, Lückhoffstr. 16, 14129 Berlin (http://www.bartens.com/).

[0186] For crops other than sugarcane, similar methods are known in the art or can easily be adapted from a known method for another crop. For example, the storage carbohydrate content of sugar beet may be determined by any of methods described for sugarcane above with adaptations to sugar beet.

[0187] Further transgenic sugar beet plants may be analysed for biomass or their sugar content or other phenotypic parameters using any method known in the art for example but not limited to:
[0188] The Determination of Glucose and Fructose in Beet Juices and Processing Products by an Enzymatic Method—ICUMSA (International Commission for Uniform Methods of Sugar Analysis, http://www.icumsa.org/index.php?id=4) Method GS 8/4/6-4 (2007) available from Verlag Dr. Albert Bartens K G, Lückhoffstr. 16, 14129 Berlin (http://www.bartens.com/)
[0189] The Determination of Mannitol, Glucose, Fructose, Sucrose and Raffinose in Beet Brei and Beet Juices by HPAEC-PAD; ICUMSA Method GS8-26 (2011) available from Verlag Dr. Albert Bartens K G, Lückhoffstr. 16, 14129 Berlin (http://www.bartens.com/)
[0190] The Determination of Sucrose, Glucose and Fructose by HPLC—in Cane Molassesand Sucrose in Beet Molasses; ICUMSA Method GS 7/4/8-23 (2011) available from Verlag Dr. Albert Bartens K G, Lückhoffstr. 16, 14129 Berlin (http://www.bartens.com/)
[0191] The Determination of Glucose, Fructose and Sucrose in Cane Juices, Syrups and Molasses, and of Sucrose in Beet Molasses by High Performance Ion Chromatography; ICUMSA Method GS 7/8/4-24 (2011) available from Verlag Dr. Albert Bartens K G, Lückhoffstr. 16, 14129 Berlin (http://www.bartens.com/)
[0192] The Determination of Glucose and Fructose in Beet Juices and Processing Products by an Enzymatic Method; ICUMSA Method GS 8/4/6-4 (2007) available from Verlag Dr. Albert Bartens K G, Lückhoffstr. 16, 14129 Berlin (http://www.bartens.com/)
[0193] The Determination of the Apparent Total Sugar Content of Beet Pulp by the Luff

[0194] Schoorl Procedure; ICUMSA Method GS 8-5 (1994) available from Verlag Dr. Albert Bartens K G, Lückhoffstr. 16, 14129 Berlin (http://www.bartens.com/).

[0195] Moreover, the present invention relates to the following specific embodiments, wherein the expression “as defined in claim/item X” is meant to direct the artisan to apply the definition as disclosed in item/claim X. For example, “a nucleic acid as defined in item 1” has to be understood such that the definition of the nucleic acid as in item 1 is to be applied to the nucleic acid. In consequence the term “as defined in item” or “as defined in claim” may be replaced with the corresponding definition of that item or claim, respectively:

[0196] Moreover, the present invention relates to the following specific embodiments:
[0197] 1. A method for enhancing one or more yield-related traits in plants relative to control plants, comprising modulating, preferably increasing expression, in a plant of a nucleic acid encoding a CLP polypeptide, wherein said CLP polypeptide comprising the Interpro motifs IPR004176 (Clp, N-terminal) and/or IPR023150 (Double Clp-N motif), preferably both, and optionally comprising a PFAM domain PF02861 preferably as a split domain wherein the N-terminal part of the PFAM domain PF02861 finds a match at or near the N-terminus of the CLP polypeptide and the C-terminal part of the PFAM domain PF02861 finds a match C-terminally of this, wherein both matching amino acid stretches are located in the N-terminal half, preferably in the N-terminal quarter of the CLP polypeptide, and wherein said CLP polypeptide is selected from the group consisting of:
   [0198] (i) an amino acid sequence of any SEQ ID NO listed in table A, preferably SEQ ID NO: 2, 87, 89, 91, 93, 95, 97, 99, 101, 103 or 105, more preferably SEQ ID NO: 2; and
   [0199] (ii) an amino acid sequence having, in increasing order of preference, at least 35%, 40%, 45%, 50%, 51%, 52%, 53%, 54%, 55%, 56%, 57%, 58%, 59%, 60%, 61%, 62%, 63%, 64%, 65%, 66%, 67%, 68%, 69%, 70%, 71%, 72%, 73%, 74%, 75%, 76%, 77%, 78%, 79%, 80%, 81%, 82%, 83%, 84%, 85%, 86%, 87%, 88%, 89%, 90%, 91%, 92%, 93%, 94%, 95%, 96%, 97%, 98%, or 99% sequence identity to the amino acid sequence of any SEQ ID NO listed in table A, preferably SEQ ID NO: 2, 87, 89, 91, 93, 95, 97, 99, 101, 103 or 105, more preferably SEQ ID NO: 2, over the entire length of the sequences of said SEQ ID NO listed in table A, preferably SEQ ID NO: 2, 87, 89, 91, 93, 95, 97, 99, 101, 103 or 105, more preferably SEQ ID NO: 2, and further preferably conferring one or more enhanced yield-related traits relative to control plants.
[0200] 2. Method according to embodiment 1 wherein the CLP polypeptide has in increasing order of preference at least 70%, 75%, 80%, 85%, 90%, 95%, 96%, 97%, 98% or 99% sequence identity to the polypeptide sequence of SEQ ID NO: 2, 87, 89, 91, 93, 95, 97, 99, 101, 103 or 105, preferably SEQ ID NO: 2 over the entire length of the amino acid sequence of SEQ ID NO: 2, 87, 89, 91, 93, 95, 97, 99, 101, 103 or 105, preferably SEQ ID NO: 2.
[0201] 3. Method according to embodiment 1 or 2, wherein said Increased expression is effected by introducing and expressing in a plant said nucleic acid encoding said CLP polypeptide.
[0202] 4. Method according to embodiment 1, 2 or 3, wherein said nucleic acid is selected from the group consisting of:
   [0203] (i) a nucleic acid represented by SEQ ID NO: 1, 3, 5, 7, 9, 11, 13, 15, 17, 19, 21, 23, 25, 27, 29, 31, 33, 35, 37, 39, 41, 43, 45, 47, 49, 51, 53, 55, 57, 59, 61, 63, 65, 67, 69 or 71; preferably SEQ ID NO: 1;
   [0204] (ii) the complement of a nucleic acid represented by SEQ ID NO: 1, 3, 5, 7, 9, 11, 13, 15, 17, 19, 21, 23, 25, 27, 29, 31, 33, 35, 37, 39, 41, 43, 45, 47, 49, 51, 53, 55, 57, 59, 61, 63, 65, 67, 69 or 71; preferably SEQ ID NO: 1;
   [0205] (iii) a nucleic acid encoding a POI polypeptide having in increasing order of preference at least 25%, 30%, 35%, 40%, 45%, 50%, 51%, 52%, 53%, 54%, 55%, 56%, 57%, 58%, 59%, 60%, 61%, 62%, 63%, 64%, 65%, 66%, 67%, 68%, 69%, 70%, 71%, 72%, 73%, 74%, 75%, 76%, 77%, 78%, 79%, 80%, 81%, 82%, 83%, 84%, 85%, 86%, 87%, 88%, 89%, 90%, 91%, 92%, 93%, 94%, 95%, 96%, 97%, 98%, or 99% sequence identity to the entire amino acid sequence of any SEQ ID NO: listed in table A, preferably SEQ ID NO: 2, and further preferably conferring one or more enhanced yield-related traits relative to control plants; and
   [0206] (iv) a nucleic acid molecule which hybridizes with a nucleic acid molecule of (i) to (iii) under high stringency hybridization conditions and preferably confers one or more enhanced yield-related traits relative to control plants.
[0207] 5. Method according to any of embodiments 1 to 4, wherein said one or more enhanced yield-related traits comprise increased yield relative to control plants, and preferably comprise increased biomass and/or increased seed yield relative to control plants.
[0208] 6. Method according to any one of embodiments 1 to 5, wherein said one or more enhanced yield-related traits are obtained under non-stress conditions.
[0209] 7. Method according to any one of embodiments 1 to 5, wherein said one or more enhanced yield-related traits are obtained under conditions of environmental stress.
[0210] 8. Method according to any of embodiments 1 to 7, wherein said CLP polypeptide comprises
   [0211] i) all of the following motifs:

Motif 1 (SEQ ID NO: 76):
A-[AGLV]-K-x(0,2)-I-x(1,3)-Q-L-[IMV]-[IV]-S-I-L-
[DH]-D-P-S-V-S-R-V-M-R-[DE]-A-[DG]-F-[NS]-S-[PST]-
x-[LV]-[KR]-[ANST]-x-[IV]-E-x-[AE];
Motif 2 (SEQ ID NO: 77):
F-x-E-x-[NST]-[ADEST]-E-N-L-x(2)-L-[CS]-x-A-L-
x(2)-[EKR]-x-[PST];
Motif 3 (SEQ ID NO: 78):
T-W-[FLM]-[FL]-F-x-G-x-[DGN]-x(2)-[ADG]-[KR]-x(2)-
[IMV]-[ACS]-x-E-L-A-x-[LV]-V-F-G-S-x(3)-[FV]-x-
[ACST]-x(3)-[ADGS]-[ADEGNST];
Motif 4 (SEQ ID NO: 79):
G-x(1,2)-V-x(0,1)-L-x-[LV]-[EG]-D-L-x-[WY]-x(2)-
[DE]-x(2)-[AST];
Motif 5 (SEQ ID NO: 80):
E-x(0,4)-L-x-[PT]-[FILV]-[ATV]-[IV]-P-[ADV]-[GST]
and
Motif 6 (SEQ ID NO: 81):
L-x-D-[AST]-I-[IV]-[IV]-x-[CGNS]-x-[AEQ];

or
[0212] ii) the motifs according to i) and in addition the consensus sequence as represented by the sequence listed under SEQ ID NO: 75; or
[0213] iii) the motifs according to i) or ii) above and in addition comprising all of the following consensus motifs

Consensus motif 1 (SEQ ID NO: 83):
HPLQC[KR]ALELCF[NS]VA
Consensus motif 2 (SEQ ID NO: 84):
NAL[GV]AA[LF]KRAQAHQR
and
Consensus motif 3 (SEQ ID NO: 85)
LDDPSVSRVMREA[GS]F;

or
[0214] iv) any 5 of the motifs listed under i) and all three consensus motifs listed under iii); or
[0215] v) any 4 of the motifs listed under i) and all three consensus motifs listed under iii); or
[0216] vi) any 4 of the motifs listed under i) and any one of the consensus motifs listed under iii); or
[0217] vii) any 3 of the motifs listed under i); or
[0218] viii) One of the motifs as described herein above;
   [0219] wherein −x represents in any motif position the presence of an amino acid residue of any type as often as the lowest integer number or the highest integer number in brackets following the −x indicate, or any of the integer numbers in between the lowest and the highest number, wherein the lowest integer number and the highest integer number might be identical and hence only one integer number is found within the brackets following −x, and wherein −x(1) is shortened to −x and any amino acid residue inserted at the position of −x does not need to be of the same type as the preceding one or another one inserted.
[0220] 9. Method according to any one of embodiments 1 to 8, wherein said nucleic acid encoding a CLP is of plant origin, preferably from a dicotyledonous plant, further preferably from the family Brassicaceae, most preferably from Arabidopsis species.
[0221] 10. Method according to any one of embodiments 1 to 9, wherein said nucleic acid encoding a CLP encodes any one of the polypeptides listed in Table A or is a portion of such a nucleic acid, or a nucleic acid capable of hybridising with a complementary sequence of such a nucleic acid.
[0222] 11. Method according to any one of embodiments 1 to 10, wherein said nucleic acid sequence encodes an orthologue or paralogue of any of the polypeptides given in Table A.
[0223] 12. Method according to any one of embodiments 1 to 11, wherein said nucleic acid encodes the polypeptide represented by SEQ ID NO: 2.
[0224] 13. Method according to any one of embodiments 1 to 12, wherein said nucleic acid is operably linked to a constitutive promoter of plant origin, preferably to a medium strength constitutive promoter of plant origin, more preferably to a GOS2 promoter, most preferably to a GOS2 promoter from rice.
[0225] 14. Plant, or part thereof, or plant cell, obtainable by a method according to any one of embodiments 1 to 14, wherein said plant, plant part or plant cell comprises a recombinant nucleic acid encoding a CLP polypeptide as defined in any of embodiments 1, 2, 4 and 8 to 12.
[0226] 15. Construct comprising:
   [0227] (i) nucleic acid encoding an CLP as defined in any of embodiments 1, 2, 4 and 8 to 12;
   [0228] (ii) one or more control sequences capable of driving expression of the nucleic acid sequence of (i); and optionally
   [0229] (iii) a transcription termination sequence.
[0230] 16. Construct according to embodiment 15, wherein one of said control sequences is a constitutive promoter of plant origin, preferably to a medium strength constitutive promoter of plant origin, more preferably to a GOS2 promoter, most preferably to a GOS2 promoter from rice.
[0231] 17. A host cell, preferably a bacterial host cell, more preferably an Agrobacterium species host cell comprising the construct according to any of embodiments 15 or 16 or the nucleic acid as defined in embodiment 4.
[0232] 18. Use of a construct according to embodiment 15 or 16 in a method for making plants having one or more enhanced yield-related traits, preferably increased yield relative to control plants, and more preferably increased seed yield and/or increased biomass relative to control plants.
[0233] 19. Plant, plant part or plant cell transformed with a construct according to embodiment 15 or 16.
[0234] 20. Method for the production of a transgenic plant having one or more enhanced yield-related traits relative to control plants, preferably increased yield relative to control plants, and more preferably increased seed yield and/or increased biomass relative to control plants, comprising:
   [0235] (i) introducing and expressing in a plant cell or plant a nucleic acid encoding an CLP polypeptide as defined in any of embodiments 1, 2, 4 and 8 to 12; and
   [0236] (ii) cultivating said plant cell or plant under conditions promoting plant growth and development.
[0237] 21. Transgenic plant having one or more enhanced yield-related traits relative to control plants, preferably increased yield relative to control plants, and more preferably increased seed yield and/or increased biomass, resulting from Increased expression of a nucleic acid encoding an CLP polypeptide as defined in any of embodiments 1, 2, 4 and 8 to 12 or a transgenic plant cell derived from said transgenic plant.
[0238] 22. Transgenic plant according to embodiment 14, 19 or 21, or a transgenic plant cell derived therefrom, wherein said plant is a crop plant, such as beet, sugarbeet or alfalfa; or a monocotyledonous plant such as sugarcane; or a cereal, such as rice, maize, wheat, barley, millet, rye, triticale, sorghum, emmer, spelt, einkorn, teff, milo or oats.
[0239] 23. Harvestable part of a plant according to embodiment 22, wherein said harvestable parts are preferably shoot biomass and/or root biomass and/or seeds.
[0240] 24. A products derived from a plant according to embodiment 22 and/or from harvestable parts of a plant according to embodiment 23.
[0241] 25. Use of a nucleic acid encoding an CLP polypeptide as defined in any of embodiments 1, 2, 4 and 8 to 12 for enhancing one or more yield-related traits in plants relative to control plants, preferably for increasing yield, and more preferably for increasing seed yield and/or for increasing biomass in plants relative to control plants.
[0242] 26. A method for manufacturing a product comprising the steps of growing the plants according to embodiment 14, 19, 21 or 22 and producing said product from or by said plants; or parts thereof, including seeds.
[0243] 27. Recombinant chromosomal DNA comprising the construct according to embodiment 15 or 16.
[0244] 28. Construct according to embodiment 15 or 16 or recombinant chromosomal DNA according to embodiment 27 comprised in a plant cell, preferably a crop plant cell.

[0245] Additional or alternative embodiments:
[0246] A. Method according to any one of embodiments 1 to 13, wherein said polypeptide is encoded by a nucleic acid molecule comprising a nucleic acid molecule selected from the group consisting of:
   [0247] (i) a nucleic acid represented by (any one of) SEQ ID NO: 1;
   [0248] (ii) the complement of a nucleic acid represented by (any one of) SEQ ID NO: 1;
   [0249] (iii) a nucleic acid encoding the polypeptide as represented by (any one of) SEQ ID NO: 2, 87, 89, 91, 93, 95, 97, 99, 101, 103 or 105, preferably SEQ ID NO: 2, and further preferably confers one or more enhanced yield-related traits relative to control plants;
   [0250] (iv) a nucleic acid having, in increasing order of preference at least 30%, 31%, 32%, 33%, 34%, 35%, 36%, 37%, 38%, 39%, 40%, 41%, 42%, 43%, 44%, 45%, 46%, 47%, 48%, 49%, 50%, 51%, 52%, 53%, 54%, 55%, 56%, 57%, 58%, 59%, 60%, 61%, 62%, 63%, 64%, 65%, 66%, 67%, 68%, 69%, 70%, 71%, 72%, 73%, 74%, 75%, 76%, 77%, 78%, 79%, 80%, 81%, 82%, 83%, 84%, 85%, 86%, 87%, 88%, 89%, 90%, 91%, 92%, 93%, 94%, 95%, 96%, 97%, 98%, or 99% sequence identity with (any of) the nucleic acid sequences of SEQ ID NO: 1, and further preferably conferring one or more enhanced yield-related traits relative to control plants;
   [0251] (v) a nucleic acid molecule which hybridizes to the complement of a nucleic acid molecule of (i) to (iv) under stringent hybridization conditions and preferably confers one or more enhanced yield-related traits relative to control plants;
   [0252] (vi) a nucleic acid encoding said polypeptide having, in increasing order of preference, at least 30%, 31%, 32%, 33%, 34%, 35%, 36%, 37%, 38%, 39%, 40%, 41%, 42%, 43%, 44%, 45%, 46%, 47%, 48%, 49%, 50%, 51%, 52%, 53%, 54%, 55%, 56%, 57%, 58%, 59%, 60%, 61%, 62%, 63%, 64%, 65%, 66%, 67%, 68%, 69%, 70%, 71%, 72%, 73%, 74%, 75%, 76%, 77%, 78%, 79%, 80%, 81%, 82%, 83%, 84%, 85%, 86%, 87%, 88%, 89%, 90%, 91%, 92%, 93%, 94%, 95%, 96%, 97%, 98%, or 99% sequence identity to the amino acid sequence represented by (any one of) SEQ ID NO: 2, 87, 89, 91, 93, 95, 97, 99, 101, 103 or 105, preferably SEQ ID NO: 2 and preferably conferring one or more enhanced yield-related traits relative to control plants; or
   [0253] (vii) a nucleic acid comprising any combination(s) of features of (i) to (vi) above.
[0254] B. Products produced from a plant according to embodiment 14, 19, 20 or 22 and/or from harvestable parts of a plant according to embodiment 23.
[0255] C. Construct according to embodiment 15 or 16 comprised in a plant cell.
[0256] D. Recombinant chromosomal DNA comprising the construct according to embodiment 15 or 16.

### Further Embodiments

[0257] I. A method for enhancing one or more yield-related traits in plants relative to control plants, comprising modulating, preferably increasing expression, in a plant of a nucleic acid encoding a CLP polypeptide, wherein said CLP polypeptide comprises the Interpro motifs IPR004176 (Clp, N-terminal) and/or IPR023150 (Double Clp-N motif), preferably both, and comprises a PFAM domain PF02861 as a split domain wherein the N-terminal part of the PFAM domain PF02861 finds a match at or near the N-terminus of the CLP polypeptide and the C-terminal part of the PFAM domain PF02861 finds a match C-terminally of this, wherein both matching amino acid stretches are located in the N-terminal half of the CLP polypeptide, preferably in the N-terminal quarter of the CLP polypeptide, and wherein said CLP polypeptide is selected from the group consisting of:
   [0258] (iii) an amino acid sequence of any SEQ ID NO listed in table A, preferably SEQ ID NO: 2; and
   [0259] (iv) an amino acid sequence having, in increasing order of preference, at least 35%, 40%, 45%, 50%, 51%, 52%, 53%, 54%, 55%, 56%, 57%, 58%, 59%, 60%, 61%, 62%, 63%, 64%, 65%, 66%, 67%, 68%, 69%, 70%, 71%, 72%, 73%, 74%, 75%, 76%, 77%, 78%, 79%, 80%, 81%, 82%, 83%, 84%, 85%, 86%, 87%, 88%, 89%, 90%, 91%, 92%, 93%, 94%, 95%, 96%, 97%, 98%, or 99% sequence identity to the amino acid sequence of any SEQ ID NO listed in table A, preferably SEQ ID NO: 2, over the entire length of the sequences of said SEQ ID NO listed in table A, preferably SEQ ID NO: 2, and further preferably conferring one or more enhanced yield-related traits relative to control plants.
[0260] II. Method according to embodiment I, wherein said nucleic acid is selected from the group consisting of:
   [0261] (v) a nucleic acid represented by SEQ ID NO: 1, 3, 5, 7, 9, 11, 13, 15, 17, 19, 21, 23, 25, 27, 29, 31, 33, 35, 37, 39, 41, 43, 45, 47, 49, 51, 53, 55, 57, 59, 61, 63, 65, 67, 69 or 71; preferably SEQ ID NO: 1;
   [0262] (vi) the complement of a nucleic acid represented by SEQ ID NO: 1, 3, 5, 7, 9, 11, 13, 15, 17, 19, 21, 23, 25, 27, 29, 31, 33, 35, 37, 39, 41, 43, 45, 47, 49, 51, 53, 55, 57, 59, 61, 63, 65, 67, 69 or 71; preferably SEQ ID NO: 1;
   [0263] (vii) a nucleic acid encoding a POI polypeptide having in increasing order of preference at least 25%, 30%, 35%, 40%, 45%, 50%, 51%, 52%, 53%, 54%, 55%, 56%, 57%, 58%, 59%, 60%, 61%, 62%, 63%, 64%, 65%, 66%, 67%, 68%, 69%, 70%, 71%, 72%, 73%, 74%, 75%, 76%, 77%, 78%, 79%, 80%, 81%, 82%, 83%, 84%, 85%, 86%, 87%, 88%, 89%, 90%, 91%, 92%, 93%, 94%, 95%, 96%, 97%, 98%, or 99% sequence identity to the entire amino acid sequence of any SEQ ID NO: listed in table A, preferably SEQ ID NO: 2, and further preferably conferring one or more enhanced yield-related traits relative to control plants; and
   [0264] (viii) a nucleic acid molecule which hybridizes with a nucleic acid molecule of (i) to (iii) under high stringency hybridization conditions and preferably confers one or more enhanced yield-related traits relative to control plants.
[0265] III. Method according to embodiment I or II, wherein said Increased expression is effected by introducing and expressing in a plant said nucleic acid encoding said CLP polypeptide.
[0266] IV. Method according to any of embodiments 1I to III, wherein said CLP polypeptide comprises
   [0267] i) all of the following motifs:

Motif 1 (SEQ ID NO: 76):
A-[AGLV]-K-x(0,2)-I-x(1,3)-Q-L-[IMV]-[IV]-S-I-L-
[DH]-D-P-S-V-S-R-V-M-R-[DE]-A-[DG]-F-[NS]-S-[PST]-
x-[LV]-[KR]-[ANST]-x-[IV]-E-x-[AE];
Motif 2 (SEQ ID NO: 77):
F-x-E-x-[NST]-[ADEST]-E-N-L-x(2)-L-[CS]-x-A-L-
x(2)-[EKR]-x-[PST];
Motif 3 (SEQ ID NO: 78):
T-W-[FLM]-[FL]-F-x-G-x-[DGN]-x(2)-[ADG]-[KR]-x(2)-
[IMV]-[ACS]-x-E-L-A-x-[LV]-V-F-G-S-x(3)-[FV]-x-
[ACST]-x(3)-[ADGS]-[ADEGNST];
Motif 4 (SEQ ID NO: 79):
G-x(1,2)-V-x(0,1)-L-x-[LV]-[EG]-D-L-x-[WY]-x(2)-
[DE]-x(2)-[AST];
Motif 5 (SEQ ID NO: 80):
E-x(0,4)-L-x-[PT]-[FILV]-[ATV]-[IV]-P-[ADV]-[GST]
and
Motif 6 (SEQ ID NO: 81):
L-x-D-[AST]-I-[IV]-[IV]-x-[CGNS]-x-[AEQ];

or
[0268] ii) the motifs according to i) and in addition the consensus sequence as represented by the sequence listed under SEQ ID NO: 75; or
[0269] iii) the motifs according to i) or ii) above and in addition comprising all of the following consensus motifs

Consensus motif 1 (SEQ ID NO: 83):
HPLQC[KR]ALELCF[NS]VA
Consensus motif 2 (SEQ ID NO: 84):
NAL[GV]AA[LF]KRAQAHQR
and
Consensus motif 3 (SEQ ID NO: 85)
LDDPSVSRVMREA[GS]F;

or
[0270] iv) any 5 of the motifs listed under i) and all three consensus motifs listed under iii); or
[0271] v) any 4 of the motifs listed under i) and all three consensus motifs listed under iii); or
[0272] vi) any 4 of the motifs listed under i) and any one of the consensus motifs listed under iii); or
[0273] vii) any 3 of the motifs listed under i); or
[0274] viii) One of the motifs as described herein above;
[0275] wherein −x represents in any motif position the presence of an amino acid residue of any type as often as the lowest integer number or the highest integer number in brackets following the −x indicate, or any of the integer numbers in between the lowest and the highest number, wherein the lowest integer number and the highest integer number might be identical and hence only one integer number is found within the brackets following −x, and wherein −x(1) is shortened to −x and any amino acid residue inserted at the position of −x does not need to be of the same type as the preceding one or another one inserted.
[0276] V. Method according to any of embodiments I to IV, wherein said one or more enhanced yield-related traits comprise increased yield relative to control plants, and preferably comprise increased biomass and/or increased seed yield relative to control plants.
[0277] VI. Method according to any one of embodiments I to V, wherein said nucleic acid encoding a CLP is of plant origin, preferably from a dicotyledonous plant, further preferably from the family Brassicaceae, most preferably from Arabidopsis species.
[0278] VII. Method according to any one of embodiments I to VI, wherein said nucleic acid is operably linked to a constitutive promoter of plant origin, preferably to a medium strength constitutive promoter of plant origin, more preferably to a GOS2 promoter, most preferably to a GOS2 promoter from rice.
[0279] VIII. Construct comprising:
   [0280] (i) nucleic acid encoding an CLP as defined in any of embodiments I, II, IV, VI and VII;
   [0281] (ii) one or more control sequences capable of driving expression of the nucleic acid sequence of (i); and optionally
   [0282] (iii) a transcription termination sequence.
[0283] IX. A host cell, preferably a bacterial host cell, more preferably an Agrobacterium species host cell comprising the construct according to any of embodiment VIII or the nucleic acid as defined in embodiment 2.
[0284] X. Use of a construct according to embodiment VIII in a method for making plants having one or more enhanced yield-related traits, preferably increased yield relative to control plants, and more preferably increased seed yield and/or increased biomass relative to control plants.
[0285] XI. Method for the production of a transgenic plant having one or more enhanced yield-related traits relative to control plants, preferably increased yield relative to control plants, and more preferably increased seed yield and/or increased biomass relative to control plants, comprising:
   [0286] (i) introducing and expressing in a plant cell or plant a nucleic acid encoding an CLP polypeptide as defined in any of embodiments I, II, IV, VI and VII; and
   [0287] (ii) cultivating said plant cell or plant under conditions promoting plant growth and development.
[0288] XII. Plant, or part thereof, or plant cell, obtainable by a method according to any one of embodiments I to VII or XI, wherein said plant, plant part or plant cell comprises a recombinant nucleic acid encoding a CLP polypeptide as defined in any of embodiments I, II, IV, VI and VII.
[0289] XIII. Transgenic plant having one or more enhanced yield-related traits relative to control plants, preferably increased yield relative to control plants, and more preferably increased seed yield and/or increased biomass, resulting from Increased expression of a nucleic acid encoding an CLP polypeptide as defined in any of embodiments I, II, IV, VI and VII or a transgenic plant cell derived from said transgenic plant.
[0290] XIV. Harvestable part of a plant according to embodiment XII or XIII and comprising the construct of embodiment VIII, wherein said harvestable part comprises the construct of embodiment VIII.
[0291] XV. The harvestable part of embodiment XIV wherein the harvestable part is preferably shoot biomass and/or root biomass, preferably taproot or tuber biomass, and/or seeds.
[0292] XVI. Transgenic plant according to embodiment XII or XIII, or a transgenic plant cell derived therefrom, wherein said plant is a crop plant, such as beet, sugar beet or alfalfa; or a monocotyledonous plant such as sugarcane; or a cereal, such as rice, maize, wheat, barley, millet, rye, triticale, sorghum, emmer, spelt, einkorn, teff, milo or oats.

### DEFINITIONS

[0293] The following definitions will be used throughout the present application. The section captions and headings in this application are for convenience and reference purpose only and should not affect in any way the meaning or interpretation of this application. The technical terms and expressions used within the scope of this application are generally to be given the meaning commonly applied to them in the pertinent art of plant biology, molecular biology, bioinformatics and plant breeding. All of the following term definitions apply to the complete content of this application. It is to be understood that as used in the specification and in the claims, “a” or “an” can mean one or more, depending upon the context in which it is used. Thus, for example, reference to “a cell” can mean that at least one cell can be utilized. The term “essentially”, “about”, “approximately” and the like in connection with an attribute or a value, particularly also define exactly the attribute or exactly the value, respectively. The term “about” in the context of a given numeric value or range relates in particular to a value or range that is within 20%, within 10%, or within 5% of the value or range given. As used herein, the term “comprising” also encompasses the term “consisting of”.

### Peptide(s)/Protein(s)

[0294] The terms “peptides”, “oligopeptides”, “polypeptide” and “protein” are used interchangeably herein and refer to amino acids in a polymeric form of any length, linked together by peptide bonds, unless mentioned herein otherwise.

### Polynucleotide(s)/Nucleic Acid(s)/Nucleic Acid Sequence(s)/Nucleotide Sequence(s)

[0295] The terms “polynucleotide(s)”, “nucleic acid sequence(s)”, “nucleotide sequence(s)”, “nucleic acid(s)”, “nucleic acid molecule” are used interchangeably herein and refer to nucleotides, either ribonucleotides or deoxyribonucleotides or a combination of both, in a polymeric unbranched form of any length.

[0296] The term “nucleotide” refers to a nucleic acid building block consisting of a nucleobase, a pentose and at least one phosphate group. Thus, the term “nucleotide” includes a nukleosidmonophosphate, nukleosiddiphosphate, and nukleosidtriphosphate.

### Homologue(s)

[0297] “Homologues” of a protein encompass peptides, oligopeptides, polypeptides, proteins and enzymes having amino acid substitutions, deletions and/or insertions relative to the unmodified protein in question and having substantially the same and functional activity as the unmodified protein from which they are derived.

[0298] “Homologues” of a gene encompass nucleic acid sequences with nucleotide substitutions, deletions and/or insertions relative to the unmodified gene in question and having substantially the same activity and/or functional properties as the unmodified gene from which they are derived, or encoding polypeptides having substantially the same biological and/or functional activity as the polypeptide encoded by the unmodified nucleic acid sequence

[0299] Orthologues and paralogues are two different forms of homologues and encompass evolutionary concepts used to describe the ancestral relationships of genes or proteins. Paralogues are genes or proteins within the same species that have originated through duplication of an ancestral gene; orthologues are genes or proteins from different organisms that have originated through specification, and are also derived from a common ancestral gene.

[0300] A “deletion” refers to removal of one or more amino acids from a protein or a removal of one or more nucleotides from a nucleic acid.

[0301] An “insertion” refers to one or more amino acid residues being introduced into a predetermined site in a protein or to one or more nucleotides being introduced into a predetermined site in a nucleic acid sequence. Regarding a protein, insertions may comprise N-terminal and/or C-terminal fusions as well as intra-sequence insertions of single or multiple amino acids. Generally, insertions within the amino acid sequence will be smaller than N- or C-terminal fusions, of the order of about 1 to 10 residues. Examples of N- or C-terminal fusion proteins or peptides include the binding domain or activation domain of a transcriptional activator as used in the yeast two-hybrid system, phage coat proteins, (histidine)-6-tag, glutathione S-transferase-tag, protein A, maltose-binding protein, dihydrofolate reductase, Tag·100 epitope, c-myc epitope, FLAG®-epitope, lacZ, CMP (calmodulin-binding peptide), HA epitope, protein C epitope and VSV epitope.

[0302] A “substitution” refers to replacement of amino acids of the protein with other amino acids having similar properties (such as similar hydrophobicity, hydrophilicity, antigenicity, propensity to form or break α-helical structures or β-sheet structures). Amino acid substitutions are typically of single residues, but may be clustered depending upon functional constraints placed upon the polypeptide. The amino acid substitutions are preferably conservative amino acid substitutions. Conservative substitution tables are well known in the art (see for example Creighton (1984) Proteins. W.H. Freeman and Company (Eds) and Table 1 below).

TABLE 1
Examples of conserved amino acid substitutions

| Residue | Conservative Substitutions |
|---|---|
| Ala | Ser |
| Arg | Lys |
| Asn | Gln; His |
| Asp | Glu |
| Gln | Asn |
| Cys | Ser |
| Glu | Asp |
| Gly | Pro |
| His | Asn; Gln |
| Ile | Leu, Val |
| Leu | Ile; Val |
| Lys | Arg; Gln |
| Met | Leu; Ile |
| Phe | Met; Leu; Tyr |
| Ser | Thr; Gly |
| Thr | Ser; Val |
| Trp | Tyr |
| Tyr | Trp; Phe |
| Val | Ile; Leu |

[0303] Amino acid substitutions, deletions and/or insertions may readily be made using peptide synthetic techniques known in the art, such as solid phase peptide synthesis and the like, or by recombinant DNA manipulation. Methods for the manipulation of DNA sequences to produce substitution, insertion or deletion variants of a protein are well known in the art. For example, techniques for making substitution mutations at predetermined sites in DNA are well known to those skilled in the art and include M13 mutagenesis, T7-Gen in vitro mutagenesis (USB, Cleveland, Ohio), QuickChange Site Directed mutagenesis (Stratagene, San Diego, Calif.), PCR-mediated site-directed mutagenesis or other site-directed mutagenesis protocols (see Current Protocols in Molecular Biology, John Wiley & Sons, N.Y. (1989 and yearly updates)).

### Derivatives

[0304] “Derivatives” include peptides, oligopeptides, polypeptides which may, compared to the amino acid sequence of the naturally-occurring form of the protein, such as the protein of interest, comprise substitutions of amino acids with non-naturally occurring amino acid residues, or additions of non-naturally occurring amino acid residues. “Derivatives” of a protein also encompass peptides, oligopeptides, polypeptides which comprise naturally occurring altered (glycosylated, acylated, prenylated, phosphorylated, myristoylated, sulphated etc.) or non-naturally altered amino acid residues compared to the amino acid sequence of a naturally-occurring form of the polypeptide. A derivative may also comprise one or more non-amino acid substituents or additions compared to the amino acid sequence from which it is derived, for example a reporter molecule or other ligand, covalently or non-covalently bound to the amino acid sequence, such as a reporter molecule which is bound to facilitate its detection, and non-naturally occurring amino acid residues relative to the amino acid sequence of a naturally-occurring protein. Furthermore, “derivatives” also include fusions of the naturally-occurring form of the protein with tagging peptides such as FLAG, HIS6 or thioredoxin (for a review of tagging peptides, see Terpe, Appl. Microbiol. Biotechnol. 60, 523-533, 2003).

[0305] “Derivatives” of nucleic acids include nucleic acids which may, compared to the nucleotide sequence of the naturally-occurring form of the nucleic acid comprise deletions, alterations, or additions with non-naturally occurring nucleotides. These may be naturally occurring altered or non-naturally altered nucleotides as compared to the nucleotide sequence of a naturally-occurring form of the nucleic acid. A derivative of a protein or nucleic acid still provides substantially the same function, e.g., enhanced yield-related trait, when expressed or repressed in a plant respectively.

### Functional Fragments

[0306] The term “functional fragment” refers to any nucleic acid or protein which comprises merely a part of the fulllength nucleic acid or fulllength protein, respectively, but still provides substantially the same function e.g. enhanced yield-related trait(s) when overexpressed or repressed in a plant respectively.

[0307] In cases where overexpression of nucleic acid is desired, the term “substantially the same functional activity” or “substantially the same function” means that any homologue and/or fragment provide increased/enhanced yield-related trait(s) when expressed in a plant. Preferably substantially the same functional activity or substantially the same function means at least 50%, at least 60%, at least 70%, at least 80%, at least 90%, at least 95%, at least 98%, at least 99% or 100% or higher increased/enhanced yield-related trait(s) compared with the functional activity provided by the exogenous expression of the full-length POI encoding nucleotide sequence or the POI amino acid sequence.

### Domain, Motif/Consensus Sequence/Signature

[0308] The term “domain” refers to a set of amino acids conserved at specific positions along an alignment of sequences of evolutionarily related proteins. While amino acids at other positions can vary between homologues, amino acids that are highly conserved at specific positions indicate amino acids that are likely essential in the structure, stability or function of a protein. Identified by their high degree of conservation in aligned sequences of a family of protein homologues, they can be used as identifiers to determine if any polypeptide in question belongs to a previously identified polypeptide family.

[0309] The term “motif” or “consensus sequence” or “signature” refers to a short conserved region in the sequence of evolutionarily related amino acid or nucleic acid sequences. For amino acid sequences motifs are frequently highly conserved parts of domains, but may also include only part of the domain, or be located outside of conserved domain (if all of the amino acids of the motif fall outside of a defined domain).

[0310] Specialist databases exist for the identification of domains, for example, SMART (Schultz et al. (1998) Proc. Natl. Acad. Sci. USA 95, 5857-5864; Letunic et al. (2002) Nucleic Acids Res 30, 242-244), InterPro (Mulder et al., (2003) Nucl. Acids. Res. 31, 315-318), Prosite (Bucher and Bairoch (1994), A generalized profile syntax for biomolecular sequences motifs and its function in automatic sequence interpretation. (In) ISMB-94; Proceedings 2nd International Conference on Intelligent Systems for Molecular Biology. Altman R., Brutlag D., Karp P., Lathrop R., Searls D., Eds., pp 53-61, AAAI Press, Menlo Park; Hulo et al., Nucl. Acids. Res. 32:D134-D137, (2004)), or Pfam (Bateman et al., Nucleic Acids Research 30(1): 276-280 (2002)) & The Pfam protein families database: R. D. Finn, J. Mistry, J. Tate, P. Coggill, A. Heger, J. E. Pollington, O. L. Gavin, P. Gunesekaran, G. Ceric, K. Forslund, L. Holm, E. L. Sonnhammer, S. R. Eddy, A. Bateman Nucleic Acids Research (2010) Database Issue 38:211-222). A set of tools for in silico analysis of protein sequences is available on the ExPASy proteomics server (Swiss Institute of Bioinformatics (Gasteiger et al., ExPASy: the proteomics server for in-depth protein knowledge and analysis, Nucleic Acids Res. 31:3784-3788(2003)). Domains or motifs may also be identified using routine techniques, such as by sequence alignment.

[0311] Methods for the alignment of sequences for comparison are well known in the art, such methods include GAP, BESTFIT, BLAST, FASTA and TFASTA. GAP uses the algorithm of Needleman and Wunsch ((1970) J Mol Biol 48: 443-453) to find the global (i.e. spanning the complete sequences) alignment of two sequences that maximizes the number of matches and minimizes the number of gaps. The BLAST algorithm (Altschul et al. (1990) J Mol Biol 215: 403-10) calculates percent sequence identity and performs a statistical analysis of the similarity between the two sequences. The software for performing BLAST analysis is publicly available through the National Centre for Biotechnology Information (NCBI). Homologues may readily be identified using, for example, the ClustalW multiple sequence alignment algorithm (version 1.83), with the default pairwise alignment parameters, and a scoring method in percentage. Global percentages of similarity and identity may also be determined using one of the methods available in the MatGAT software package (Campanella et al., BMC Bioinformatics. 2003 Jul. 10; 4:29. MatGAT: an application that generates similarity/identity matrices using protein or DNA sequences.). Minor manual editing may be performed to optimise alignment between conserved motifs, as would be apparent to a person skilled in the art. Furthermore, instead of using full-length sequences for the identification of homologues, specific domains may also be used. The sequence identity values may be determined over the entire nucleic acid or amino acid sequence or over selected domains or conserved motif(s), using the programs mentioned above using the default parameters. For local alignments, the Smith-Waterman algorithm is particularly useful (Smith T F, Waterman M S (1981) J. Mol. Biol 147(1); 195-7).

### Reciprocal BLAST

[0312] Typically, this involves a first BLAST involving BLASTing (i.e. running the BLAST software with the sequence of interest as query sequence) a query sequence (for example using any of the sequences listed in Table A of the Examples section) against any sequence database, such as the publicly available NCBI database. BLASTN or TBLASTX (using standard default values) are generally used when starting from a nucleotide sequence, and BLASTP or TBLASTN (using standard default values) when starting from a protein sequence. The BLAST results may optionally be filtered. The full-length sequences of either the filtered results or non-filtered results are then BLASTed back (second BLAST) against sequences from the organism from which the query sequence is derived. The results of the first and second BLASTs are then compared. A paralogue is identified if a high-ranking hit from the first blast is from the same species as from which the query sequence is derived, a BLAST back then ideally results in the query sequence amongst the highest hits; an orthologue is identified if a high-ranking hit in the first BLAST is not from the same species as from which the query sequence is derived, and preferably results upon BLAST back in the query sequence being among the highest hits.

[0313] High-ranking hits are those having a low E-value. The lower the E-value, the more significant the score (or in other words the lower the chance that the hit was found by chance). Computation of the E-value is well known in the art. In addition to E-values, comparisons are also scored by percentage identity. Percentage identity refers to the number of identical nucleotides (or amino acids) between the two compared nucleic acid (or polypeptide) sequences over a particular length. In the case of large families, ClustalW may be used, followed by a neighbour joining tree, to help visualize clustering of related genes and to identify orthologues and paralogues.

### Transit Peptide

[0314] A “transit peptide” (or transit signal, signal peptide, signal sequence) is a short (3-60 amino acids long) peptide chain that directs the transport of a protein, preferably to organelles within the cell or to certain subcellular locations or for the secretion of a protein. Transit peptides may also be called transit signal, signal peptide, signal sequence, targeting signals, or (subcellular) localization signals.

### Hybridisation

[0315] The term “hybridisation” as defined herein is a process wherein substantially homologous complementary nucleotide sequences anneal to each other. The hybridisation process can occur entirely in solution, i.e. both complementary nucleic acids are in solution. The hybridisation process can also occur with one of the complementary nucleic acids immobilised to a matrix such as magnetic beads, Sepharose beads or any other resin. The hybridisation process can furthermore occur with one of the complementary nucleic acids immobilised to a solid support such as a nitro-cellulose or nylon membrane or immobilised by e.g. photolithography to, for example, a siliceous glass support (the latter known as nucleic acid arrays or microarrays or as nucleic acid chips). In order to allow hybridisation to occur, the nucleic acid molecules are generally thermally or chemically denatured to melt a double strand into two single strands and/or to remove hairpins or other secondary structures from single stranded nucleic acids.

[0316] The term “stringency” refers to the conditions under which a hybridisation takes place. The stringency of hybridisation is influenced by conditions such as temperature, salt concentration, ionic strength and hybridisation buffer composition. Generally, low stringency conditions are selected to be about 30° C. lower than the thermal melting point (Tₘ) for the specific sequence at a defined ionic strength and pH. Medium stringency conditions are when the temperature is 20° C. below Tₘ, and high stringency conditions are when the temperature is 10° C. below Tₘ. High stringency hybridisation conditions are typically used for isolating hybridising sequences that have high sequence similarity to the target nucleic acid sequence. However, nucleic acids may deviate in sequence and still encode a substantially identical polypeptide, due to the degeneracy of the genetic code. Therefore medium stringency hybridisation conditions may sometimes be needed to identify such nucleic acid molecules.

[0317] The Tₘ is the temperature under defined ionic strength and pH, at which 50% of the target sequence hybridises to a perfectly matched probe. The Tₘ is dependent upon the solution conditions and the base composition and length of the probe. For example, longer sequences hybridise specifically at higher temperatures. The maximum rate of hybridisation is obtained from about 16° C. up to 32° C. below Tₘ. The presence of monovalent cations in the hybridisation solution reduce the electrostatic repulsion between the two nucleic acid strands thereby promoting hybrid formation; this effect is visible for sodium concentrations of up to 0.4M (for higher concentrations, this effect may be ignored). Formamide reduces the melting temperature of DNA-DNA and DNA-RNA duplexes with 0.6 to 0.7° C. for each percent formamide, and addition of 50% formamide allows hybridisation to be performed at 30 to 45° C., though the rate of hybridisation will be lowered. Base pair mismatches reduce the hybridisation rate and the thermal stability of the duplexes. On average and for large probes, the Tm decreases about 1° C. per % base mismatch. The Tₘ may be calculated using the following equations, depending on the types of hybrids:

1) DNA-DNA hybrids (Meinkoth and Wahl, Anal. Biochem., 138: 267-284, 1984):

Tₘ=81.5° C.+16.6×log₁₀[Na⁺]^{a}+0.41×%[G/C^{b}]−500×[L^{c}]⁻¹−0.61×% formamide

2) DNA-RNA or RNA-RNA hybrids:

Tₘ=79.8° C.+18.5(log₁₀[Na⁺]^{a})+0.58(% G/C^{b})+11.8(% G/C^{b})²−820/L^{c}

3) oligo-DNA or oligo-RNAs hybrids:
[0318] For <20 nucleotides: Tₘ=2 (lₙ)
[0319] For 20-35 nucleotides: Tₘ=22+1.46 (lₙ)
   ^{a} or for other monovalent cation, but only accurate in the 0.01-0.4 M range.
   ^{b} only accurate for % GC in the 30% to 75% range.
   ^{c} L=length of duplex in base pairs.
   ^{d} oligo, oligonucleotide; lₙ, =effective length of primer=2×(no. of G/C)+(no. of A/T).

[0320] Non-specific binding may be controlled using any one of a number of known techniques such as, for example, blocking the membrane with protein containing solutions, additions of heterologous RNA, DNA, and SDS to the hybridisation buffer, and treatment with Rnase. For non-homologous probes, a series of hybridizations may be performed by varying one of (i) progressively lowering the annealing temperature (for example from 68° C. to 42° C.) or (ii) progressively lowering the formamide concentration (for example from 50% to 0%). The skilled artisan is aware of various parameters which may be altered during hybridisation and which will either maintain or change the stringency conditions.

[0321] Besides the hybridisation conditions, specificity of hybridisation typically also depends on the function of post-hybridisation washes. To remove background resulting from non-specific hybridisation, samples are washed with dilute salt solutions. Critical factors of such washes include the ionic strength and temperature of the final wash solution: the lower the salt concentration and the higher the wash temperature, the higher the stringency of the wash. Wash conditions are typically performed at or below hybridisation stringency. A positive hybridisation gives a signal that is at least twice of that of the background. Generally, suitable stringent conditions for nucleic acid hybridisation assays or gene amplification detection procedures are as set forth above. More or less stringent conditions may also be selected. The skilled artisan is aware of various parameters which may be altered during washing and which will either maintain or change the stringency conditions.

[0322] For example, typical high stringency hybridisation conditions for DNA hybrids longer than 50 nucleotides encompass hybridisation at 65° C. in 1×SSC or at 42° C. in 1×SSC and 50% formamide, followed by washing at 65° C. in 0.3×SSC. Examples of medium stringency hybridisation conditions for DNA hybrids longer than 50 nucleotides encompass hybridisation at 50° C. in 4×SSC or at 40° C. in 6×SSC and 50% formamide, followed by washing at 50° C. in 2×SSC. The length of the hybrid is the anticipated length for the hybridising nucleic acid. When nucleic acids of known sequence are hybridised, the hybrid length may be determined by aligning the sequences and identifying the conserved regions described herein. 1×SSC is 0.15M NaCl and 15 mM sodium citrate; the hybridisation solution and wash solutions may additionally include 5×Denhardt's reagent, 0.5-1.0% SDS, 100 μg/ml denatured, fragmented salmon sperm DNA, 0.5% sodium pyrophosphate. In a preferred embodiment high stringency conditions mean hybridisation at 65° C. in 0.1×SSC comprising 0.1 SDS and optionally 5×Denhardt's reagent, 100 μg/ml denatured, fragmented salmon sperm DNA, 0.5% sodium pyrophosphate, followed by the washing at 65° C. in 0.3×SSC.

[0323] For the purposes of defining the level of stringency, reference can be made to Sambrook et al. (2001) Molecular Cloning: a laboratory manual, 3^{rd} Edition, Cold Spring Harbor Laboratory Press, CSH, New York or to Current Protocols in Molecular Biology, John Wiley & Sons, N.Y. (1989 and yearly updates).

### Splice Variant

[0324] The term “splice variant” as used herein encompasses variants of a nucleic acid sequence in which selected introns and/or exons have been excised, replaced, displaced or added, or in which introns have been shortened or lengthened. Such variants will be ones in which the biological activity of the protein is substantially retained; this may be achieved by selectively retaining functional segments of the protein. Such splice variants may be found in nature or may be manmade. Methods for predicting and isolating such splice variants are well known in the art (see for example Foissac and Schiex (2005) BMC Bioinformatics 6: 25).

### Allelic Variant

[0325] “Alleles” or “allelic variants” are alternative forms of a given gene, located at the same chromosomal position. Allelic variants encompass Single Nucleotide Polymorphisms (SNPs), as well as Small Insertion/Deletion Polymorphisms (INDELs). The size of INDELs is usually less than 100 bp. SNPs and INDELs form the largest set of sequence variants in naturally occurring polymorphic strains of most organisms.

### Endogenous

[0326] Reference herein to an “endogenous” nucleic acid and/or protein refers to the nucleic acid and/or protein in question as found in a plant in its natural form (i.e., without there being any human intervention like recombinant DNA technology), but also refers to that same gene (or a substantially homologous nucleic acid/gene) in an isolated form subsequently (re)introduced into a plant (a transgene). For example, a transgenic plant containing such a transgene may encounter a substantial reduction of the transgene expression and/or substantial reduction of expression of the endogenous gene. The isolated gene may be isolated from an organism or may be manmade, for example by chemical synthesis.

### Exogenous

[0327] The term “exogenous” (in contrast to “endogenous”) nucleic acid or gene refers to a nucleic acid that has been introduced in a plant by means of recombinant DNA technology. An “exogenous” nucleic acid can either not occur in this plant in its natural form, be different from the nucleic acid in question as found in the plant in its natural form, or can be identical to a nucleic acid found in the plant in its natural form, but not integrated within its natural genetic environment. The corresponding meaning of “exogenous” is applied in the context of protein expression. For example, a transgenic plant containing a transgene, i.e., an exogenous nucleic acid, may, when compared to the expression of the endogenous gene, encounter a substantial increase of the expression of the respective gene or protein in total. A transgenic plant according to the present invention includes an exogenous POI nucleic acid integrated at any genetic loci and optionally the plant may also include the endogenous gene within the natural genetic background.

### Gene Shuffling/Directed Evolution

[0328] “Gene shuffling” or “directed evolution” consists of iterations of DNA shuffling followed by appropriate screening and/or selection to generate variants of nucleic acids or portions thereof encoding proteins having a modified biological activity (Castle et al., (2004) Science 304(5674): 1151-4; U.S. Pat. Nos. 5,811,238 and 6,395,547).

### Expression Cassette

[0329] “Expression cassette” as used herein is DNA capable of being expressed in a host cell or in an in-vitro expression system. Preferably the DNA, part of the DNA or the arrangement of the genetic elements forming the expression cassette is artificial. The skilled artisan is well aware of the genetic elements that must be present in the expression cassette in order to be successfully expressed. The expression cassette comprises a sequence of interest to be expressed operably linked to one or more control sequences (at least to a promoter) as described herein. Additional regulatory elements may include transcriptional as well as translational enhancers, one or more NEENA as described herein, and/or one or more RENA as described herein. Those skilled in the art will be aware of terminator and enhancer sequences that may be suitable for use in performing the invention. An intron sequence may also be added to the 5′ untranslated region (UTR) or in the coding sequence to increase the amount of the mature message that accumulates in the cytosol, as described in the definitions section for increased expression/overexpression. Other control sequences (besides promoter, enhancer, silencer, intron sequences, 3′UTR and/or 5′UTR regions) may be protein and/or RNA stabilizing elements. Such sequences would be known or may readily be obtained by a person skilled in the art.

The Expression Cassette May be Integrated into the Genome of a Host Cell and Replicated Together with the Genome of Said Host Cell.

### Construct/Genetic Construct

[0330] This is DNA—artificial in part or total or artificial in the arrangement of the genetic elements contained—capable of increasing or decreasing the expression of DNA and/or protein of interest typically by replication in a host cell and used for introduction of a DNA sequence of interest into a host cell or host organism. Replication may occur after integration into the host cell's genome or through the presence of the construct as part of a vector or an artificial chromosome inside the host cell.

[0331] Host cells of the invention may be any cell selected from bacterial cells, such as Escherichia coli or Agrobacterium species cells, yeast cells, fungal, algal or cyanobacterial cells or plant cells. The skilled artisan is well aware of the genetic elements that must be present on the genetic construct in order to successfully transform, select and propagate host cells containing the sequence of interest.

[0332] Typically the construct/genetic construct is an expression construct and comprises one or more expression cassettes that may lead to overexpression (overexpression construct) or reduced expression of a gene of interest. A construct may consist of an expression cassette. The sequence(s) of interest is/are operably linked to one or more control sequences (at least to a promoter) as described herein. Additional regulatory elements may include transcriptional as well as translational enhancers, one or more NEENA as described herein, and/or one or more RENA as described herein. Those skilled in the art will be aware of terminator and enhancer sequences that may be suitable for use in performing the invention. An intron sequence may also be added to the 5′ untranslated region (UTR) or in the coding sequence to increase the amount of the mature message that accumulates in the cytosol, as described in the definitions section for increased expression/overexpression. Other control sequences (besides promoter, enhancer, silencer, intron sequences, 3′UTR and/or 5′UTR regions) may be protein and/or RNA stabilizing elements. Such sequences would be known or may readily be obtained by a person skilled in the art.

[0333] The genetic constructs of the invention may further include an origin of replication sequence that is required for maintenance and/or replication in a specific cell type. One example is when a genetic construct is required to be maintained in a bacterial cell as an episomal genetic element (e.g. plasmid or cosmid molecule). Preferred origins of replication include, but are not limited to, the f1-ori and colE1.

[0334] For the detection of the successful transfer of the nucleic acid sequences as used in the methods of the invention and/or selection of transgenic plants comprising these nucleic acids, it is advantageous to use marker genes (or reporter genes). Therefore, the genetic construct may optionally comprise a selectable marker gene. Selectable markers are described in more detail in the “definitions” section herein. The marker genes may be removed or excised from the transgenic cell once they are no longer needed. Techniques for marker removal are known in the art, useful techniques are described above in the definitions section.

### Vector Construct/Vector

[0335] This is DNA (such as but, not limited to plasmids or viral DNA)—artificial in part or total or artificial in the arrangement of the genetic elements contained—capable of replication in a host cell and used for introduction of a DNA sequence of interest into a host cell or host organism. A vector may be a construct or may comprise at least one construct. A vector may replicate without integrating into the genome of a host cell, e.g. a plasmid vector in a bacterial host cell, or it may integrate part or all of its DNA into the genome of the host cell and thus lead to replication and expression of its DNA. Host cells of the invention may be any cell selected from bacterial cells, such as Escherichia coli or Agrobacterium species cells, yeast cells, fungal, algal or cyanobacterial cells or plant cells. The skilled artisan is well aware of the genetic elements that must be present on the genetic construct in order to successfully transform, select and propagate host cells containing the sequence of interest. Typically the vector comprises at least one expression cassette. The one or more sequence(s) of interest is operably linked to one or more control sequences (at least to a promoter) as described herein. Additional regulatory elements may include transcriptional as well as translational enhancers, one or more NEENA as described herein and/or one or more RENA as described herein. Those skilled in the art will be aware of terminator and enhancer sequences that may be suitable for use in performing the invention. An intron sequence may also be added to the 5′ untranslated region (UTR) or in the coding sequence to increase the amount of the mature message that accumulates in the cytosol, as described in the definitions section. Other control sequences (besides promoter, enhancer, silencer, intron sequences, 3′UTR and/or 5′UTR regions) may be protein and/or RNA stabilizing elements. Such sequences would be known or may readily be obtained by a person skilled in the art.

### Regulatory Element/Control Sequence/Promoter

[0336] The terms “regulatory element”, “control sequence” and “promoter” are all used interchangeably herein and are to be taken in a broad context to refer to regulatory nucleic acid sequences capable of effecting expression of the sequences to which they are associated. The term “promoter” or “promoter sequence” typically refers to a nucleic acid control sequence located upstream from the transcriptional start of a gene and which is involved in recognising and binding of RNA polymerase and other proteins, thereby directing transcription of an operably linked nucleic acid. Encompassed by the aforementioned terms are transcriptional regulatory sequences derived from a classical eukaryotic genomic gene (including the TATA box which is required for accurate transcription initiation, with or without a CCAAT box sequence) and additional regulatory elements (i.e. upstream activating sequences, enhancers and silencers) which alter gene expression in response to developmental and/or external stimuli, or in a tissue-specific manner. Also included within the term is a transcriptional regulatory sequence of a classical prokaryotic gene, in which case it may include a −35 box sequence and/or −10 box transcriptional regulatory sequences. The term “regulatory element” also encompasses a synthetic fusion molecule or derivative that confers, activates or enhances expression of a nucleic acid molecule in a cell, tissue or organ.

[0337] A “plant promoter” comprises regulatory elements, which mediate the expression of a coding sequence segment in plant cells. Accordingly, a plant promoter need not be of plant origin, but may originate from viruses or micro-organisms, for example from viruses which attack plant cells. The “plant promoter” can also originate from a plant cell, e.g. from the plant which is transformed with the nucleic acid sequence to be expressed in the inventive process and described herein. This also applies to other “plant” regulatory signals, such as “plant” terminators. The promoters upstream of the nucleotide sequences useful in the methods of the present invention can be modified by one or more nucleotide substitution(s), insertion(s) and/or deletion(s) without interfering with the functionality or activity of either the promoters, the open reading frame (ORF) or the 3′-regulatory region such as terminators or other 3′ regulatory regions which are located away from the ORF. It is furthermore possible that the activity of the promoters is increased by modification of their sequence, or that they are replaced completely by more active promoters, even promoters from heterologous organisms. For expression in plants, the nucleic acid molecule must, as described herein, be linked operably to or comprise a suitable promoter which expresses the gene at the right point in time and with the required spatial expression pattern.

[0338] For the identification of functionally equivalent promoters, the promoter strength and/or expression pattern of a candidate promoter may be analysed for example by operably linking the promoter to a reporter gene and assaying the expression level and pattern of the reporter gene in various tissues of the plant. Suitable well-known reporter genes include for example beta-glucuronidase or beta-galactosidase. The promoter activity is assayed by measuring the enzymatic activity of the beta-glucuronidase or beta-galactosidase. The promoter strength and/or expression pattern may then be compared to that of a reference promoter (such as the one used in the methods of the present invention). Alternatively, promoter strength may be assayed by quantifying mRNA levels or by comparing mRNA levels of the nucleic acid used in the methods of the present invention, with mRNA levels of housekeeping genes such as 18S rRNA, using methods known in the art, such as Northern blotting with densitometric analysis of autoradiograms, quantitative real-time PCR or RTPCR (Heid et al., 1996 Genome Methods 6: 986-994). Generally by “weak promoter” is intended a promoter that drives expression of a coding sequence at a low level. By “low level” is intended at levels of about 1/10,000 transcripts to about 1/100,000 transcripts, to about 1/500,0000 transcripts per cell. Conversely, a “strong promoter” drives expression of a coding sequence at high level, or at about 1/10 transcripts to about 1/100 transcripts to about 1/1000 transcripts per cell. Generally, by “medium strength promoter” is intended a promoter that drives expression of a coding sequence at a lower level than a strong promoter, in particular at a level that is in all instances below that obtained when under the control of a 35S CaMV promoter.

### Operably Linked

[0339] The term “operably linked” or “functionally linked” is used interchangeably and, as used herein, refers to a functional linkage between the promoter sequence and the gene of interest, such that the promoter sequence is able to direct transcription of the gene of interest.

[0340] The term “functional linkage” or “functionally linked” with respect to regulatory elements, is to be understood as meaning, for example, the sequential arrangement of a regulatory element (e.g. a promoter) with a nucleic acid sequence to be expressed and, if appropriate, further regulatory elements (such as e.g., a terminator, NEENA as described herein or a RENA as described herein) in such a way that each of the regulatory elements can fulfil its intended function to allow, modify, facilitate or otherwise influence expression of said nucleis acid sequence. As a synonym the wording “operable linkage” or “operably linked” may be used. The expression may result, depending on the arrangement of the nucleic acid sequences, in sense or antisense RNA. To this end, direct linkage in the chemical sense is not necessarily required. Genetic control sequences such as, for example, enhancer sequences, can also exert their function on the target sequence from positions which are further away, or indeed from other DNA molecules. Preferred arrangements are those in which the nucleic acid sequence to be expressed recombinantly is positioned behind the sequence acting as promoter, so that the two sequences are linked covalently to each other. The distance between the promoter sequence and the nucleic acid sequence to be expressed recombinantly is preferably less than 200 base pairs, especially preferably less than 100 base pairs, very especially preferably less than 50 base pairs. In a preferred embodiment, the nucleic acid sequence to be transcribed is located behind the promoter in such a way that the transcription start is identical with the desired beginning of the RNA of the invention. Functional linkage, and an expression construct, can be generated by means of customary recombination and cloning techniques as described (e.g., in Maniatis T, Fritsch E F and Sambrook J (1989) Molecular Cloning: A Laboratory Manual, 2nd Ed., Cold Spring Harbor Laboratory, Cold Spring Harbor (N.Y.); Silhavy et al. (1984) Experiments with Gene Fusions, Cold Spring Harbor Laboratory, Cold Spring Harbor (N.Y.); Ausubel et al. (1987) Current Protocols in Molecular Biology, Greene Publishing Assoc. and Wiley Interscience; Gelvin et al. (Eds) (1990) Plant Molecular Biology Manual; Kluwer Academic Publisher, Dordrecht, The Netherlands). However, further sequences, which, for example, act as a linker with specific cleavage sites for restriction enzymes, or as a signal peptide, may also be positioned between the two sequences. The insertion of sequences may also lead to the expression of fusion proteins. Preferably, the expression construct, consisting of a linkage of a regulatory region for example a promoter and nucleic acid sequence to be expressed, can exist in a vector-integrated form and be inserted into a plant genome, for example by transformation.

### Constitutive Promoter

[0341] A “constitutive promoter” refers to a promoter that is transcriptionally active during most, but not necessarily all, phases of growth and development and under most environmental conditions, in at least one cell, tissue or organ. Table 2a below gives examples of constitutive promoters.

TABLE 2a
Examples of constitutive promoters

| Gene Source | Reference |
|---|---|
| Actin | McElroy et al, Plant Cell, 2: 163-171, 1990 |
| HMGP | WO 2004/070039 |
| CAMV 35S | Odell et al, Nature, 313: 810-812, 1985 |
| CaMV 19S | Nilsson et al., Physiol. Plant. 100: 456-462, 1997 |
| GOS2 | de Pater et al, Plant J Nov; 2(6): 837-44, 1992, |
| | WO 2004/065596 |
| Ubiquitin | Christensen et al, Plant Mol. Biol. 18: 675-689, 1992 |
| Rice cyclophilin | Buchholz et al, Plant Mol Biol. 25(5): 837-43, 1994 |
| Maize H3 histone | Lepetit et al, Mol. Gen. Genet. 231: 276-285, 1992 |
| Alfalfa H3 | Wu et al. Plant Mol. Biol. 11: 641-649, 1988 |
| histone | |
| Actin 2 | An et al, Plant J. 10(1); 107-121, 1996 |
| 34S FMV | Sanger et al., Plant. Mol. Biol., 14, 1990: 433-443 |
| Rubisco small | U.S. Pat. No. 4,962,028 |
| subunit | |
| OCS | Leisner (1988) Proc Natl Acad Sci USA 85(5): 2553 |
| SAD1 | Jain et al., Crop Science, 39 (6), 1999: 1696 |
| SAD2 | Jain et al., Crop Science, 39 (6), 1999: 1696 |
| nos | Shaw et al. (1984) Nucleic Acids Res. 12(20): |
| | 7831-7846 |
| V-ATPase | WO 01/14572 |
| Super promoter | WO 95/14098 |
| G-box proteins | WO 94/12015 |

### Ubiquitous Promoter

[0342] A “ubiquitous promoter” is active in substantially all tissues or cells of an organism.

### Developmentally-Regulated Promoter

[0343] A “developmentally-regulated promoter” is active during certain developmental stages or in parts of the plant that undergo developmental changes.

### Inducible Promoter

[0344] An “inducible promoter” has induced or increased transcription initiation in response to a chemical (for a review see Gatz 1997, Annu. Rev. Plant Physiol. Plant Mol. Biol., 48:89-108), environmental or physical stimulus, or may be “stress-inducible”, i.e. activated when a plant is exposed to various stress conditions, or a “pathogen-inducible” i.e. activated when a plant is exposed to exposure to various pathogens.

### Organ-Specific/Tissue-Specific Promoter

[0345] An “organ-specific” or “tissue-specific promoter” is one that is capable of preferentially initiating transcription in certain organs or tissues, such as the leaves, roots, seed tissue etc. For example, a “root-specific promoter” is a promoter that is transcriptionally active predominantly in plant roots, substantially to the exclusion of any other parts of a plant, whilst still allowing for any leaky expression in these other plant parts. Promoters able to initiate transcription in certain cells only are referred to herein as “cell-specific”.

[0346] Examples of root-specific promoters are listed in Table 2b below:

TABLE 2b
Examples of root-specific promoters

| Gene Source | Reference |
|---|---|
| RCc3 | Plant Mol Biol. 1995 January; 27(2): 237-48 |
| Arabidopsis PHT1 | Koyama et al., 2005; Mudge et al. (2002, |
| | Plant J. 31: 341) |
| Medicago phosphate | Xiao et al., 2006, Plant Biol (Stuttg). |
| transporter | 2006 July; 8(4): 439-49 |
| Arabidopsis Pyk10 | Nitz et al. (2001) Plant Sci 161(2): 337-346 |
| root-expressible genes | Tingey et al., EMBO J. 6: 1, 1987. |
| tobacco auxin- | Van der Zaal et al., Plant Mol. Biol. 16, |
| inducible gene | 983, 1991. |
| β-tubulin | Oppenheimer, et al., Gene 63: 87, 1988. |
| tobacco root- | Conkling, et al., Plant Physiol. 93: 1203, 1990. |
| specific genes | |
| B. napus G1-3b gene | U.S. Pat. No. 5,401,836 |
| SbPRP1 | Suzuki et al., Plant Mol. Biol. 21: 109-119, |
| | 1993. |
| LRX1 | Baumberger et al. 2001, Genes & Dev. 15: 1128 |
| BTG-26 Brassica | US 20050044585 |
| napus | |
| LeAMT1 (tomato) | Lauter et al. (1996, PNAS 3: 8139) |
| The LeNRT1-1 | Lauter et al. (1996, PNAS 3: 8139) |
| (tomato) | |
| class I patatin | Liu et al., Plant Mol. Biol. 17 (6): 1139-1154 |
| gene (potato) | |
| KDC1 (Daucus | Downey et al. (2000, J. Biol. Chem. 275: 39420) |
| carota) | |
| TobRB7 gene | W Song (1997) PhD Thesis, North Carolina State |
| | University, Raleigh, NC USA |
| OsRAB5a (rice) | Wang et al. 2002, Plant Sci. 163: 273 |
| ALF5 (Arabidopsis) | Diener et al. (2001, Plant Cell 13: 1625) |
| NRT2; 1Np (N. | Quesada et al. (1997, Plant Mol. Biol. 34: 265) |
| plumbaginifolia) | |

[0347] A “seed-specific promoter” is transcriptionally active predominantly in seed tissue, but not necessarily exclusively in seed tissue (in cases of leaky expression). The seed-specific promoter may be active during seed development and/or during germination. The seed specific promoter may be endosperm/aleurone/embryo specific. Examples of seed-specific promoters (endosperm/aleurone/embryo specific) are shown in Table 2c to Table 2f below. Further examples of seed-specific promoters are given in Qing Qu and Takaiwa (Plant Biotechnol. J. 2, 113-125, 2004), which disclosure is incorporated by reference herein as if fully set forth.

TABLE 2c
Examples of seed-specific promoters

| Gene source | Reference |
|---|---|
| seed-specific genes | Simon et al., Plant Mol. Biol. 5: 191, 1985; |
| | Scofield et al., J. Biol. Chem. 262: 12202, 1987.; |
| | Baszczynski et al., Plant Mol. Biol. 14: 633, 1990. |
| Brazil Nut albumin | Pearson et al., Plant Mol. Biol. 18: 235-245, 1992. |
| legumin | Ellis et al., Plant Mol. Biol. 10: 203-214, 1988. |
| glutelin (rice) | Takaiwa et al., Mol. Gen. Genet. 208: 15-22, 1986; |
| | Takaiwa et al., FEBS Letts. 221: 43-47, 1987. |
| zein | Matzke et al Plant Mol Biol, 14(3): 323-32 1990 |
| napA | Stalberg et al, Planta 199: 515-519, 1996. |
| wheat LMW and HMW | Mol Gen Genet 216: 81-90, 1989; NAR 17: 461-2, 1989 |
| glutenin-1 | |
| wheat SPA | Albani et al, Plant Cell, 9: 171-184, 1997 |
| wheat α, β, γ-gliadins | EMBO J. 3: 1409-15, 1984 |
| barley Itr1 promoter | Diaz et al. (1995) Mol Gen Genet 248(5): 592-8 |
| barley B1, C, D, hordein | Theor Appl Gen 98: 1253-62, 1999; Plant J 4: 343-55, |
| | 1993; Mol Gen Genet 250: 750-60, 1996 |
| barley DOF | Mena et al, The Plant Journal, 116(1): 53-62, 1998 |
| blz2 | EP99106056.7 |
| synthetic promoter | Vicente-Carbajosa et al., Plant J. 13: 629-640, 1998. |
| rice prolamin NRP33 | Wu et al, Plant Cell Physiology 39(8) 885-889, 1998 |
| rice a-globulin Glb-1 | Wu et al, Plant Cell Physiology 39(8) 885-889, 1998 |
| rice OSH1 | Sato et al, Proc. Natl. Acad. Sci. USA, 93: 8117-8122, |
| | 1996 |
| rice α-globulin REB/OHP-1 | Nakase et al. Plant Mol. Biol. 33: 513-522, 1997 |
| rice ADP-glucose pyrophos- | Trans Res 6: 157-68, 1997 |
| phorylase | |
| maize ESR gene family | Plant J 12: 235-46, 1997 |
| sorghum α-kafirin | DeRose et al., Plant Mol. Biol 32: 1029-35, 1996 |
| KNOX | Postma-Haarsma et al, Plant Mol. Biol. 39: 257-71, 1999 |
| rice oleosin | Wu et al, J. Biochem. 123: 386, 1998 |
| sunflower oleosin | Cummins et al., Plant Mol. Biol. 19: 873-876, 1992 |
| PRO0117, putative rice 40S | WO 2004/070039 |
| ribosomal protein | |
| PRO0136, rice alanine | unpublished |
| aminotransferase | |
| PRO0147, trypsin inhibitor | unpublished |
| ITR1 (barley) | |
| PRO0151, rice WSI18 | WO 2004/070039 |
| PRO0175, rice RAB21 | WO 2004/070039 |
| PRO005 | WO 2004/070039 |
| PRO0095 | WO 2004/070039 |
| α-amylase (Amy32b) | Lanahan et al, Plant Cell 4: 203-211, 1992; Skriver et al, |
| | Proc Natl Acad Sci USA 88: 7266-7270, 1991 |
| cathepsin β-like gene | Cejudo et al, Plant Mol Biol 20: 849-856, 1992 |
| Barley Ltp2 | Kalla et al., Plant J. 6: 849-60, 1994 |
| Chi26 | Leah et al., Plant J. 4: 579-89, 1994 |
| Maize B-Peru | Selinger et al., Genetics 149; 1125-38, 1998 |

TABLE 2d
examples of endosperm-specific promoters

| Gene source | Reference |
|---|---|
| glutelin (rice) | Takaiwa et al. (1986) Mol Gen Genet 208: 15-22; |
| | Takaiwa et al. (1987) FEBS Letts. 221: 43-47 |
| zein | Matzke et al., (1990) Plant Mol Biol 14(3): 323-32 |
| wheat LMW | Colot et al. (1989) Mol Gen Genet 216: 81-90, |
| and HMW | Anderson et al. (1989) NAR 17: 461-2 |
| glutenin-1 | |
| wheat SPA | Albani et al. (1997) Plant Cell 9: 171-184 |
| wheat gliadins | Rafalski et al. (1984) EMBO 3: 1409-15 |
| barley Itr1 | Diaz et al. (1995) Mol Gen Genet 248(5): 592-8 |
| promoter | |
| barley B1, C, D, | Cho et al. (1999) Theor Appl Genet 98: 1253-62; |
| hordein | Muller et al. (1993) Plant J 4: 343-55; |
| | Sorenson et al. (1996) Mol Gen Genet 250: 750-60 |
| barley DOF | Mena et al, (1998) Plant J 116(1): 53-62 |
| blz2 | Onate et al. (1999) J Biol Chem 274(14): 9175-82 |
| synthetic promoter | Vicente-Carbajosa et al. (1998) Plant J 13: 629-640 |
| rice prolamin | Wu et al, (1998) Plant Cell Physiol 39(8) 885-889 |
| NRP33 | |
| rice globulin | Wu et al. (1998) Plant Cell Physiol 39(8) 885-889 |
| Glb-1 | |
| rice globulin | Nakase et al. (1997) Plant Molec Biol 33: 513-522 |
| REB/OHP-1 | |
| rice ADP-glucose | Russell et al. (1997) Trans Res 6: 157-68 |
| pyrophosphorylase | |
| maize ESR | Opsahl-Ferstad et al. (1997) Plant J 12: 235-46 |
| gene family | |
| sorghum kafirin | DeRose et al. (1996) Plant Mol Biol 32: 1029-35 |

TABLE 2e
Examples of embryo specific promoters:

| Gene source | Reference |
|---|---|
| rice OSH1 | Sato et al, Proc. Natl. Acad. Sci. USA, 93: 8117-8122, |
| | 1996 |
| KNOX | Postma-Haarsma et al, Plant Mol. Biol. 39: 257-71, 1999 |
| PRO0151 | WO 2004/070039 |
| PRO0175 | WO 2004/070039 |
| PRO005 | WO 2004/070039 |
| PRO0095 | WO 2004/070039 |

TABLE 2f
Examples of aleurone-specific promoters:

| Gene source | Reference |
|---|---|
| α-amylase | Lanahan et al, Plant Cell 4: 203-211, 1992; |
| (Amy32b) | Skriver et al, Proc Natl Acad Sci USA 88: |
| | 7266-7270, 1991 |
| cathepsin β-like gene | Cejudo et al, Plant Mol Biol 20: 849-856, 1992 |
| Barley Ltp2 | Kalla et al., Plant J. 6: 849-60, 1994 |
| Chi26 | Leah et al., Plant J. 4: 579-89, 1994 |
| Maize B-Peru | Selinger et al., Genetics 149; 1125-38, 1998 |

[0348] A “green tissue-specific promoter” as defined herein is a promoter that is transcriptionally active predominantly in green tissue, substantially to the exclusion of any other parts of a plant, whilst still allowing for any leaky expression in these other plant parts.

[0349] Examples of green tissue-specific promoters which may be used to perform the methods of the invention are shown in Table 2g below.

TABLE 2g
Examples of green tissue-specific promoters

| Gene | Expression | Reference |
|---|---|---|
| Maize Orthophosphate | Leaf specific | Fukavama et al., Plant |
| dikinase | | Physiol. 2001 November; |
| | | 127(3): 1136-46 |
| Maize Phosphoenolpyruvate | Leaf specific | Kausch et al., Plant |
| carboxylase | | Mol Biol. 2001 January; |
| | | 45(1): 1-15 |
| Rice Phosphoenolpyruvate | Leaf specific | Lin et al., 2004 DNA |
| carboxylase | | Seq. 2004 August; |
| | | 15(4): 269-76 |
| Rice small subunit Rubisco | Leaf specific | Nomura et al., Plant Mol |
| | | Biol. 2000 September; |
| | | 44(1); 99-106 |
| rice beta expansin EXBP9 | Shoot specific | WO 2004/070039 |
| Pigeonpea small subunit | Leaf specific | Panguluri et al., Indian |
| Rubisco | | J Exp Biol. 2005 April; |
| | | 43(4): 369-72 |
| Pea RBCS3A | Leaf specific | |

[0350] Another example of a tissue-specific promoter is a meristem-specific promoter, which is transcriptionally active predominantly in meristematic tissue, substantially to the exclusion of any other parts of a plant, whilst still allowing for any leaky expression in these other plant parts. Examples of green meristem-specific promoters which may be used to perform the methods of the invention are shown in Table 2h below.

TABLE 2h
Examples of meristem-specific promoters

| Gene source | Expression pattern | Reference |
|---|---|---|
| rice OSH1 | Shoot apical meristem, | Sato et al. (1996) |
| | from embryo globular | Proc. Natl. Acad. Sci. |
| | stage to seedling stage | USA, 93: 8117-8122 |
| Rice metallothionein | Meristem specific | BAD87835.1 |
| WAK1 & WAK 2 | Shoot and root apical | Wagner & Kohorn |
| | meristems, and in ex- | (2001) Plant Cell |
| | panding leaves and sepals | 13(2): 303-318 |

### Terminator

[0351] The term “terminator” encompasses a control sequence which is a DNA sequence at the end of a transcriptional unit which signals 3′ processing and polyadenylation of a primary transcript and termination of transcription. The terminator can be derived from the natural gene, from a variety of other plant genes, or from T-DNA. The terminator to be added may be derived from, for example, the nopaline synthase or octopine synthase genes, or alternatively from another plant gene, or less preferably from any other eukaryotic gene.

### Selectable Marker (Gene)/Reporter Gene

[0352] “Selectable marker”, “selectable marker gene” or “reporter gene” includes any gene that confers a phenotype on a cell in which it is expressed to facilitate the identification and/or selection of cells that are transfected or transformed with a nucleic acid construct of the invention. These marker genes enable the identification of a successful transfer of the nucleic acid molecules via a series of different principles. Suitable markers may be selected from markers that confer antibiotic or herbicide resistance, that introduce a new metabolic trait or that allow visual selection. Examples of selectable marker genes include genes conferring resistance to antibiotics (such as nptII that phosphorylates neomycin and kanamycin, or hpt, phosphorylating hygromycin, or genes conferring resistance to, for example, bleomycin, streptomycin, tetracyclin, chloramphenicol, ampicillin, gentamycin, geneticin (G418), spectinomycin or blasticidin), to herbicides (for example bar which provides resistance to Basta®; aroA or gox providing resistance against glyphosate, or the genes conferring resistance to, for example, imidazolinone, phosphinothricin or sulfonylurea), or genes that provide a metabolic trait (such as manA that allows plants to use mannose as sole carbon source or xylose isomerase for the utilisation of xylose, or antinutritive markers such as the resistance to 2-deoxyglucose). Expression of visual marker genes results in the formation of colour (for example β-glucuronidase, GUS or β-galactosidase with its coloured substrates, for example X-Gal), luminescence (such as the luciferin/luceferase system) or fluorescence (Green Fluorescent Protein, GFP, and derivatives thereof). This list represents only a small number of possible markers. The skilled worker is familiar with such markers. Different markers are preferred, depending on the organism and the selection method.

[0353] It is known that upon stable or transient integration of nucleic acids into plant cells, only a minority of the cells takes up the foreign DNA and, if desired, integrates it into its genome, depending on the expression vector used and the transfection technique used. To identify and select these integrants, a gene coding for a selectable marker (such as the ones described above) is usually introduced into the host cells together with the gene of interest. These markers can for example be used in mutants in which these genes are not functional by, for example, deletion by conventional methods. Furthermore, nucleic acid molecules encoding a selectable marker can be introduced into a host cell on the same vector that comprises the sequence encoding the polypeptides of the invention or used in the methods of the invention, or else in a separate vector. Cells which have been stably transfected with the introduced nucleic acid can be identified for example by selection (for example, cells which have integrated the selectable marker survive whereas the other cells die).

[0354] Since the marker genes, particularly genes for resistance to antibiotics and herbicides, are no longer required or are undesired in the transgenic host cell once the nucleic acids have been introduced successfully, the process according to the invention for introducing the nucleic acids advantageously employs techniques which enable the removal or excision of these marker genes. One such a method is what is known as co-transformation. The co-transformation method employs two vectors simultaneously for the transformation, one vector bearing the nucleic acid according to the invention and a second bearing the marker gene(s). A large proportion of transformants receives or, in the case of plants, comprises (up to 40% or more of the transformants), both vectors. In case of transformation with Agrobacteria, the transformants usually receive only a part of the vector, i.e. the sequence flanked by the T-DNA, which usually represents the expression cassette. The marker genes can subsequently be removed from the transformed plant by performing crosses. In another method, marker genes integrated into a transposon are used for the transformation together with desired nucleic acid (known as the Ac/Ds technology). The transformants can be crossed with a transposase source or the transformants are transformed with a nucleic acid construct conferring expression of a transposase, transiently or stable. In some cases (approx. 10%), the transposon jumps out of the genome of the host cell once transformation has taken place successfully and is lost. In a further number of cases, the transposon jumps to a different location. In these cases the marker gene must be eliminated by performing crosses. In microbiology, techniques were developed which make possible, or facilitate, the detection of such events. A further advantageous method relies on what is known as recombination systems; whose advantage is that elimination by crossing can be dispensed with. The best-known system of this type is what is known as the Cre/lox system. Cre1 is a recombinase that removes the sequences located between the loxP sequences. If the marker gene is integrated between the loxP sequences, it is removed once transformation has taken place successfully, by expression of the recombinase. Further recombination systems are the HIN/HIX, FLP/FRT and REP/STB system (Tribble et al., J. Biol. Chem., 275, 2000: 22255-22267; Velmurugan et al., J. Cell Biol., 149, 2000: 553-566). A site-specific integration into the plant genome of the nucleic acid sequences according to the invention is possible. Naturally, these methods can also be applied to microorganisms such as yeast, fungi or bacteria.

### Transgenic/Transgene/Recombinant

[0355] For the purposes of the invention, “transgenic”, “transgene” or “recombinant” means with regard to, for example, a nucleic acid sequence, an expression cassette, genetic construct or a vector comprising the nucleic acid sequence or an organism transformed with the nucleic acid sequences, expression cassettes or vectors according to the invention, all those constructions brought about by recombinant methods in which either
[0356] (a) the nucleic acid sequences encoding proteins useful in the methods of the invention, or
[0357] (b) genetic control sequence(s) which is operably linked with the nucleic acid sequence according to the invention, for example a promoter, or
[0358] (c) a) and b)
   are not located in their natural genetic environment or have been modified by recombinant methods, it being possible for the modification to take the form of, for example, a substitution, addition, deletion, inversion or insertion of one or more nucleotide residues. The natural genetic environment is understood as meaning the natural genomic or chromosomal locus in the original plant or the presence in a genomic library. In the case of a genomic library, the natural genetic environment of the nucleic acid sequence is preferably retained, at least in part. The environment flanks the nucleic acid sequence at least on one side and has a sequence length of at least 50 bp, preferably at least 500 bp, especially preferably at least 1000 bp, most preferably at least 5000 bp. A naturally occurring expression cassette—for example the naturally occurring combination of the natural promoter of the nucleic acid sequences with the corresponding nucleic acid sequence encoding a polypeptide useful in the methods of the present invention, as defined above—becomes a transgenic expression cassette when this expression cassette is modified by man by non-natural, synthetic (“artificial”) methods such as, for example, mutagenic treatment. Suitable methods are described, for example, in U.S. Pat. No. 5,565,350, US200405323 or WO 00/15815. Furthermore, a naturally occurring expression cassette—for example the naturally occurring combination of the natural promoter of the nucleic acid sequences with the corresponding nucleic acid sequence encoding a protein useful in the methods of the present invention, as defined above—becomes a recombinant expression cassette when this expression cassette is not integrated in the natural genetic environment but in a different genetic environment as a result of an isolation of said expression cassette from its natural genetic environment and re-insertion at a different genetic environment.

[0359] It shall further be noted that in the context of the present invention, the term “isolated nucleic acid” or “isolated polypeptide” may in some instances be considered as a synonym for a “recombinant nucleic acid” or a “recombinant polypeptide”, respectively and refers to a nucleic acid or polypeptide that is not located in its natural genetic environment or cellular environment, respectively, and/or that has been modified by recombinant methods. An isolated nucleic acid sequence or isolated nucleic acid molecule is one that is not in its native surrounding or its native nucleic acid neighborhood, yet it is physically and functionally connected to other nucleic acid sequences or nucleic acid molecules and is found as part of a nucleic acid construct, vector sequence or chromosome.

[0360] A transgenic plant for the purposes of the invention is thus understood as meaning, as above, that the nucleic acids used in the method of the invention are not present in, or originating from, the genome of said plant, or are present in the genome of said plant but not at their natural locus in the genome of said plant, it being possible for the nucleic acids to be expressed homologously or heterologously. However, as mentioned, transgenic also means that, while the nucleic acids according to the invention or used in the inventive method are at their natural position in the genome of a plant, the sequence has been modified with regard to the natural sequence, and/or that the regulatory sequences of the natural sequences have been modified. Transgenic is preferably understood as meaning the expression of the nucleic acids according to the invention at an unnatural locus in the genome, i.e. homologous or, preferably, heterologous expression of the nucleic acids takes place. Preferred transgenic plants are mentioned herein.

[0361] As used herein, the term “transgenic” relating to an organisms e.g. transgenic plant refers to an organism, e.g., a plant, plant cell, callus, plant tissue, or plant part that exogenously contains the nucleic acid, construct, vector or expression cassette described herein or a part thereof which is preferably introduced by processes that are not essentially biological, preferably by Agrobacteria-mediated transformation or particle bombardment. A transgenic plant for the purposes of the invention is thus understood as meaning, as above, that the nucleic acids described herein are not present in, or not originating from the genome of said plant, or are present in the genome of said plant but not at their natural genetic environment in the genome of said plant, it being possible for the nucleic acids to be expressed homologously or heterologously

### Modulation

[0362] The term “modulation” means in relation to expression or gene expression, a process in which the expression level is changed by said gene expression in comparison to the control plant, the expression level may be increased or decreased. The original, unmodulated expression may be of any kind of expression of a structural RNA (rRNA, tRNA) or mRNA with subsequent translation. For the purposes of this invention, the original unmodulated expression may also be absence of any expression. The term “modulating the activity” or the term “modulating expression” with respect to the proteins or nucleic acids used in the methods, constructs, expression cassettes, vectors, plants, seeds, host cells and uses of the invention shall mean any change of the expression of the inventive nucleic acid sequences or encoded proteins which leads to increased or decreased yield-related traits in the plants. The expression can increase from zero (absence of, or immeasurable expression) to a certain amount, or can decrease from a certain amount to immeasurable small amounts or zero.

### Expression

[0363] The term “expression” or “gene expression” means the transcription of a specific gene or specific genes or specific genetic construct. The term “expression” or “gene expression” in particular means the transcription of a gene or genes or genetic construct into structural RNA (rRNA, tRNA) or mRNA with or without subsequent translation of the latter into a protein. The process includes transcription of DNA and processing of the resulting mRNA product. The term “expression” or “gene expression” can also include the translation of the mRNA and therewith the synthesis of the encoded protein, i.e., protein expression.

### Increased Expression/Overexpression

[0364] The term “increased expression”, “enhanced expression” or “overexpression” as used herein means any form of expression that is additional to the original wild-type expression level. For the purposes of this invention, the original wild-type expression level might also be zero, i.e. absence of expression or immeasurable expression. Reference herein to “increased expression”, “enhanced expression” or “overexpression” is taken to mean an increase in gene expression and/or, as far as referring to polypeptides, increased polypeptide levels and/or increased polypeptide activity, relative to control plants. The increase in expression, polypeptide levels or polypeptide activity is in increasing order of preference at least 10%, 20%, 30%, 40% or 50%, 60%, 70%, 80%, 85%, 90%, or 100% or even more compared to that of control plants. The increase in expression may be in increasing order of preference at least 100%, 200%, 300%, 400%, 500%, 600%, 700%, 800%, 900%, 1000%, 2000%, 3000%, 4000% or 5000% or even more compared to that of control plants. In cases when the control plants have only very little expression, polypeptide levels or polypeptide activity of the sequence in question and/or the recombinant gene is under the control of strong regulatory element(s) the increase in expression, polypeptide levels or polypeptide activity may be at least 100 times, 200 times, 300 times, 400 times, 500 times, 600 times, 700 times, 800 times, 900 times, 1000 times, 2000 times, 3000 times, 5000 times, 10 000 times, 20 000 times, 50 000 times, 100 000 times or even more compared to that of control plants. Methods for increasing expression of genes or gene products are well documented in the art and include, for example, overexpression driven by appropriate promoters, the use of transcription enhancers or translation enhancers. Isolated nucleic acids which serve as promoter or enhancer elements may be introduced in an appropriate position (typically upstream) of a non-heterologous form of a polynucleotide so as to upregulate expression of a nucleic acid encoding the polypeptide of interest. For example, endogenous promoters may be altered in vivo by mutation, deletion, and/or substitution (see, Kmiec, U.S. Pat. No. 5,565,350; Zarling et al., WO9322443), or isolated promoters may be introduced into a plant cell in the proper orientation and distance from a gene of the present invention so as to control the expression of the gene.

[0365] If polypeptide expression is desired, it is generally desirable to include a polyadenylation region at the 3′-end of a polynucleotide coding region. The polyadenylation region can be derived from the natural gene, from a variety of other plant genes, or from T-DNA. The 3′ end sequence to be added may be derived from, for example, the nopaline synthase or octopine synthase genes, or alternatively from another plant gene, or less preferably from any other eukaryotic gene.

[0366] An intron sequence may also be added to the 5′ untranslated region (UTR) or the coding sequence of the partial coding sequence to increase the amount of the mature message that accumulates in the cytosol. Inclusion of a spliceable intron in the transcription unit in both plant and animal expression constructs has been shown to increase gene expression at both the mRNA and protein levels up to 1000-fold (Buchman and Berg (1988) Mol. Cell biol. 8: 4395-4405; Callis et al. (1987) Genes Dev 1:1183-1200). Such intron enhancement of gene expression is typically greatest when placed near the 5′ end of the transcription unit. Use of the maize introns Adh1-S intron 1, 2, and 6, the Bronze-1 intron are known in the art. For general information see: The Maize Handbook, Chapter 116, Freeling and Walbot, Eds., Springer, N.Y. (1994).

[0367] To obtain increased expression or overexpression of a polypeptide most commonly the nucleic acid encoding this polypeptide is overexpressed in sense orientation with a polyadenylation signal. Introns or other enhancing elements may be used in addition to a promoter suitable for driving expression with the intended expression pattern. In contrast to this, overexpression of the same nucleic acid sequence as antisense construct will not result in increased expression of the protein, but decreased expression of the protein.

### Decreased Expression

[0368] Reference herein to “decreased expression” or “reduction or substantial elimination” of expression is taken to mean a decrease in endogenous gene expression and/or polypeptide levels and/or polypeptide activity relative to control plants. The reduction or substantial elimination is in increasing order of preference at least 10%, 20%, 30%, 40% or 50%, 60%, 70%, 80%, 85%, 90%, or 95%, 96%, 97%, 98%, 99% or more compared to that of control plants.

[0369] For the reduction or substantial elimination of expression an endogenous gene in a plant, a sufficient length of substantially contiguous nucleotides of a nucleic acid sequence is required. In order to perform gene silencing, this may be as little as 20, 19, 18, 17, 16, 15, 14, 13, 12, 11, 10 or fewer nucleotides, alternatively this may be as much as the entire gene (including the 5′ and/or 3′ UTR, either in part or in whole). The stretch of substantially contiguous nucleotides may be derived from the nucleic acid encoding the protein of interest (target gene), or from any nucleic acid capable of encoding an orthologue, paralogue or homologue of the protein of interest. Preferably, the stretch of substantially contiguous nucleotides is capable of forming hydrogen bonds with the target gene (either sense or antisense strand), more preferably, the stretch of substantially contiguous nucleotides has, in increasing order of preference, 50%, 60%, 70%, 80%, 85%, 90%, 95%, 96%, 97%, 98%, 99%, 100% sequence identity to the target gene (either sense or antisense strand). A nucleic acid sequence encoding a (functional) polypeptide is not a requirement for the various methods discussed herein for the reduction or substantial elimination of expression of an endogenous gene.

[0370] This reduction or substantial elimination of expression may be achieved using routine tools and techniques. A preferred method for the reduction or substantial elimination of endogenous gene expression is by introducing, preferably by recombinant methods, and expressing in a plant a genetic construct into which the nucleic acid (in this case a stretch of substantially contiguous nucleotides derived from the gene of interest, or from any nucleic acid capable of encoding an orthologue, paralogue or homologue of any one of the protein of interest) is cloned as an inverted repeat (in part or completely), separated by a spacer (non-coding DNA).

[0371] In such a preferred method, expression of the endogenous gene is reduced or substantially eliminated through RNA-mediated silencing using an inverted repeat of a nucleic acid or a part thereof (in this case a stretch of substantially contiguous nucleotides derived from the gene of interest, or from any nucleic acid capable of encoding an orthologue, paralogue or homologue of the protein of interest), preferably capable of forming a hairpin structure. The inverted repeat is cloned in an expression vector comprising control sequences. A non-coding DNA nucleic acid sequence (a spacer, for example a matrix attachment region fragment (MAR), an intron, a polylinker, etc.) is located between the two inverted nucleic acids forming the inverted repeat. After transcription of the inverted repeat, a chimeric RNA with a self-complementary structure is formed (partial or complete). This double-stranded RNA structure is referred to as the hairpin RNA (hpRNA). The hpRNA is processed by the plant into siRNAs that are incorporated into an RNA-induced silencing complex (RISC). The RISC further cleaves the mRNA transcripts, thereby substantially reducing the number of mRNA transcripts to be translated into polypeptides. For further general details see for example, Grierson et al. (1998) WO 98/53083; Waterhouse et al. (1999) WO 99/53050).

[0372] Performance of the methods of the invention does not rely on introducing and expressing in a plant a genetic construct into which the nucleic acid is cloned as an inverted repeat, but any one or more of several well-known “gene silencing” methods may be used to achieve the same effects.

[0373] One such method for the reduction of endogenous gene expression is RNA-mediated silencing of gene expression (downregulation). Silencing in this case is triggered in a plant by a double stranded RNA sequence (dsRNA) that is substantially similar to the target endogenous gene. This dsRNA is further processed by the plant into about 20 to about 26 nucleotides called short interfering RNAs (siRNAs). The siRNAs are incorporated into an RNA-induced silencing complex (RISC) that cleaves the mRNA transcript of the endogenous target gene, thereby substantially reducing the number of mRNA transcripts to be translated into a polypeptide. Preferably, the double stranded RNA sequence corresponds to a target gene.

[0374] Another example of an RNA silencing method involves the introduction of nucleic acid sequences or parts thereof (in this case a stretch of substantially contiguous nucleotides derived from the gene of interest, or from any nucleic acid capable of encoding an orthologue, paralogue or homologue of the protein of interest) in a sense orientation into a plant. “Sense orientation” refers to a DNA sequence that is homologous to an mRNA transcript thereof. Introduced into a plant would therefore be at least one copy of the nucleic acid sequence. The additional nucleic acid sequence will reduce expression of the endogenous gene, giving rise to a phenomenon known as co-suppression. The reduction of gene expression will be more pronounced if several additional copies of a nucleic acid sequence are introduced into the plant, as there is a positive correlation between high transcript levels and the triggering of co-suppression.

[0375] Another example of an RNA silencing method involves the use of antisense nucleic acid sequences. An “antisense” nucleic acid sequence comprises a nucleotide sequence that is complementary to a “sense” nucleic acid sequence encoding a protein, i.e. complementary to the coding strand of a double-stranded cDNA molecule or complementary to an mRNA transcript sequence. The antisense nucleic acid sequence is preferably complementary to the endogenous gene to be silenced. The complementarity may be located in the “coding region” and/or in the “non-coding region” of a gene. The term “coding region” refers to a region of the nucleotide sequence comprising codons that are translated into amino acid residues. The term “non-coding region” refers to 5′ and 3′ sequences that flank the coding region that are transcribed but not translated into amino acids (also referred to as 5′ and 3′ untranslated regions).

[0376] Antisense nucleic acid sequences can be designed according to the rules of Watson and Crick base pairing. The antisense nucleic acid sequence may be complementary to the entire nucleic acid sequence (in this case a stretch of substantially contiguous nucleotides derived from the gene of interest, or from any nucleic acid capable of encoding an orthologue, paralogue or homologue of the protein of interest), but may also be an oligonucleotide that is antisense to only a part of the nucleic acid sequence (including the mRNA 5′ and 3′ UTR). For example, the antisense oligonucleotide sequence may be complementary to the region surrounding the translation start site of an mRNA transcript encoding a polypeptide. The length of a suitable antisense oligonucleotide sequence is known in the art and may start from about 50, 45, 40, 35, 30, 25, 20, 15 or 10 nucleotides in length or less. An antisense nucleic acid sequence according to the invention may be constructed using chemical synthesis and enzymatic ligation reactions using methods known in the art. For example, an antisense nucleic acid sequence (e.g., an antisense oligonucleotide sequence) may be chemically synthesized using naturally occurring nucleotides or variously modified nucleotides designed to increase the biological stability of the molecules or to increase the physical stability of the duplex formed between the antisense and sense nucleic acid sequences, e.g., phosphorothioate derivatives and acridine substituted nucleotides may be used. Examples of modified nucleotides that may be used to generate the antisense nucleic acid sequences are well known in the art. Known nucleotide modifications include methylation, cyclization and ‘caps’ and substitution of one or more of the naturally occurring nucleotides with an analogue such as inosine. Other modifications of nucleotides are well known in the art.

[0377] The antisense nucleic acid sequence can be produced biologically using an expression vector into which a nucleic acid sequence has been subcloned in an antisense orientation (i.e., RNA transcribed from the inserted nucleic acid will be of an antisense orientation to a target nucleic acid of interest). Preferably, production of antisense nucleic acid sequences in plants occurs by means of a stably integrated nucleic acid construct comprising a promoter, an operably linked antisense oligonucleotide, and a terminator.

[0378] The nucleic acid molecules used for silencing in the methods of the invention (whether introduced into a plant or generated in situ) hybridize with or bind to mRNA transcripts and/or genomic DNA encoding a polypeptide to thereby inhibit expression of the protein, e.g., by inhibiting transcription and/or translation. The hybridization can be by conventional nucleotide complementarity to form a stable duplex, or, for example, in the case of an antisense nucleic acid sequence which binds to DNA duplexes, through specific interactions in the major groove of the double helix. Antisense nucleic acid sequences may be introduced into a plant by transformation or direct injection at a specific tissue site. Alternatively, antisense nucleic acid sequences can be modified to target selected cells and then administered systemically. For example, for systemic administration, antisense nucleic acid sequences can be modified such that they specifically bind to receptors or antigens expressed on a selected cell surface, e.g., by linking the antisense nucleic acid sequence to peptides or antibodies which bind to cell surface receptors or antigens. The antisense nucleic acid sequences can also be delivered to cells using the vectors described herein.

[0379] According to a further aspect, the antisense nucleic acid sequence is an a-anomeric nucleic acid sequence. An a-anomeric nucleic acid sequence forms specific double-stranded hybrids with complementary RNA in which, contrary to the usual b-units, the strands run parallel to each other (Gaultier et al. (1987) Nucl Ac Res 15: 6625-6641). The antisense nucleic acid sequence may also comprise a 2′-o-methylribonucleotide (Inoue et al. (1987) Nucl Ac Res 15, 6131-6148) or a chimeric RNA-DNA analogue (Inoue et al. (1987) FEBS Lett. 215, 327-330).

[0380] The reduction or substantial elimination of endogenous gene expression may also be performed using ribozymes. Ribozymes are catalytic RNA molecules with ribonuclease activity that are capable of cleaving a single-stranded nucleic acid sequence, such as an mRNA, to which they have a complementary region. Thus, ribozymes (e.g., hammerhead ribozymes (described in Haselhoff and Gerlach (1988) Nature 334, 585-591) can be used to catalytically cleave mRNA transcripts encoding a polypeptide, thereby substantially reducing the number of mRNA transcripts to be translated into a polypeptide. A ribozyme having specificity for a nucleic acid sequence can be designed (see for example: Cech et al. U.S. Pat. No. 4,987,071; and Cech et al. U.S. Pat. No. 5,116,742). Alternatively, mRNA transcripts corresponding to a nucleic acid sequence can be used to select a catalytic RNA having a specific ribonuclease activity from a pool of RNA molecules (Bartel and Szostak (1993) Science 261, 1411-1418). The use of ribozymes for gene silencing in plants is known in the art (e.g., Atkins et al. (1994) WO 94/00012; Lenne et al. (1995) WO 95/03404; Lutziger et al. (2000) WO 00/00619; Prinsen et al. (1997) WO 97/13865 and Scott et al. (1997) WO 97/38116).

[0381] Gene silencing may also be achieved by insertion mutagenesis (for example, T-DNA insertion or transposon insertion) or by strategies as described by, among others, Angell and Baulcombe ((1999) Plant J 20(3): 357-62), (Amplicon VIGS WO 98/36083), or Baulcombe (WO 99/15682).

[0382] Gene silencing may also occur if there is a mutation on an endogenous gene and/or a mutation on an isolated gene/nucleic acid subsequently introduced into a plant. The reduction or substantial elimination may be caused by a non-functional polypeptide. For example, the polypeptide may bind to various interacting proteins; one or more mutation(s) and/or truncation(s) may therefore provide for a polypeptide that is still able to bind interacting proteins (such as receptor proteins) but that cannot exhibit its normal function (such as signalling ligand).

[0383] A further approach to gene silencing is by targeting nucleic acid sequences complementary to the regulatory region of the gene (e.g., the promoter and/or enhancers) to form triple helical structures that prevent transcription of the gene in target cells. See Helene, C., Anticancer Drug Res. 6, 569-84, 1991; Helene et al., Ann. N.Y. Acad. Sci. 660, 27-36 1992; and Maher, L. J. Bioassays 14, 807-15, 1992.

[0384] Other methods, such as the use of antibodies directed to an endogenous polypeptide for inhibiting its function in planta, or interference in the signalling pathway in which a polypeptide is involved, will be well known to the skilled man. In particular, it can be envisaged that manmade molecules may be useful for inhibiting the biological function of a target polypeptide, or for interfering with the signalling pathway in which the target polypeptide is involved.

[0385] Alternatively, a screening program may be set up to identify in a plant population natural variants of a gene, which variants encode polypeptides with reduced activity. Such natural variants may also be used for example, to perform homologous recombination.

[0386] Artificial and/or natural microRNAs (miRNAs) may be used to knock out gene expression and/or mRNA translation. Endogenous miRNAs are single stranded small RNAs of typically 19-24 nucleotides long. They function primarily to regulate gene expression and/or mRNA translation. Most plant microRNAs (miRNAs) have perfect or near-perfect complementarity with their target sequences. However, there are natural targets with up to five mismatches. They are processed from longer non-coding RNAs with characteristic fold-back structures by double-strand specific RNases of the Dicer family. Upon processing, they are incorporated in the RNA-induced silencing complex (RISC) by binding to its main component, an Argonaute protein. MiRNAs serve as the specificity components of RISC, since they basepair to target nucleic acids, mostly mRNAs, in the cytoplasm. Subsequent regulatory events include target mRNA cleavage and destruction and/or translational inhibition. Effects of miRNA overexpression are thus often reflected in decreased mRNA levels of target genes.

[0387] Artificial microRNAs (amiRNAs), which are typically 21 nucleotides in length, can be genetically engineered specifically to negatively regulate gene expression of single or multiple genes of interest. Determinants of plant microRNA target selection are well known in the art. Empirical parameters for target recognition have been defined and can be used to aid in the design of specific amiRNAs, (Schwab et al., Dev. Cell 8, 517-527, 2005). Convenient tools for design and generation of amiRNAs and their precursors are also available to the public (Schwab et al., Plant Cell 18, 1121-1133, 2006).

[0388] For optimal performance, the gene silencing techniques used for reducing expression in a plant of an endogenous gene requires the use of nucleic acid sequences from monocotyledonous plants for transformation of monocotyledonous plants, and from dicotyledonous plants for transformation of dicotyledonous plants. Preferably, a nucleic acid sequence from any given plant species is introduced into that same species. For example, a nucleic acid sequence from rice is transformed into a rice plant. However, it is not an absolute requirement that the nucleic acid sequence to be introduced originates from the same plant species as the plant in which it will be introduced. It is sufficient that there is substantial homology between the endogenous target gene and the nucleic acid to be introduced.

[0389] Described above are examples of various methods for the reduction or substantial elimination of expression in a plant of an endogenous gene. A person skilled in the art would readily be able to adapt the aforementioned methods for silencing so as to achieve reduction of expression of an endogenous gene in a whole plant or in parts thereof through the use of an appropriate promoter, for example.

### Transformation

[0390] The term “introduction” or “transformation” as referred to herein encompasses the transfer of an exogenous polynucleotide into a host cell, irrespective of the method used for transfer. Plant tissue capable of subsequent clonal propagation, whether by organogenesis or embryogenesis, may be transformed with a genetic construct of the present invention and a whole plant regenerated there from. The particular tissue chosen will vary depending on the clonal propagation systems available for, and best suited to, the particular species being transformed. Exemplary tissue targets include leaf disks, pollen, embryos, cotyledons, hypocotyls, megagametophytes, callus tissue, existing meristematic tissue (e.g., apical meristem, axillary buds, and root meristems), and induced meristem tissue (e.g., cotyledon meristem and hypocotyl meristem). The polynucleotide may be transiently or stably introduced into a host cell and may be maintained non-integrated, for example, as a plasmid. Alternatively, it may be integrated into the host genome. The resulting transformed plant cell may then be used to regenerate a transformed plant in a manner known to persons skilled in the art. Alternatively, a plant cell that cannot be regenerated into a plant may be chosen as host cell, i.e. the resulting transformed plant cell does not have the capacity to regenerate into a (whole) plant.

[0391] The transfer of foreign genes into the genome of a plant is called transformation. Transformation of plant species is now a fairly routine technique. Advantageously, any of several transformation methods may be used to introduce the gene of interest into a suitable ancestor cell. The methods described for the transformation and regeneration of plants from plant tissues or plant cells may be utilized for transient or for stable transformation. Transformation methods include the use of liposomes, electroporation, chemicals that increase free DNA uptake, injection of the DNA directly into the plant, particle gun bombardment, transformation using viruses or pollen and microprojection. Methods may be selected from the calcium/polyethylene glycol method for protoplasts (Krens, F. A. et al., (1982) Nature 296, 72-74; Negrutiu I et al. (1987) Plant Mol Biol 8: 363-373); electroporation of protoplasts (Shillito R. D. et al. (1985) Bio/Technol 3, 1099-1102); microinjection into plant material (Crossway A et al., (1986) Mol. Gen Genet 202: 179-185); DNA or RNA-coated particle bombardment (Klein T M et al., (1987) Nature 327: 70) infection with (non-integrative) viruses and the like. Transgenic plants, including transgenic crop plants, are preferably produced via Agrobacterium-mediated transformation. An advantageous transformation method is the transformation in planta. To this end, it is possible, for example, to allow the agrobacteria to act on plant seeds or to inoculate the plant meristem with agrobacteria. It has proved particularly expedient in accordance with the invention to allow a suspension of transformed agrobacteria to act on the intact plant or at least on the flower primordia. The plant is subsequently grown on until the seeds of the treated plant are obtained (Clough and Bent, Plant J. (1998) 16, 735-743). Methods for Agrobacterium-mediated transformation of rice include well known methods for rice transformation, such as those described in any of the following: European patent application EP 1198985 A1, Aldemita and Hodges (Planta 199: 612-617, 1996); Chan et al. (Plant Mol Biol 22 (3): 491-506, 1993), Hiei et al. (Plant J 6 (2): 271-282, 1994), which disclosures are incorporated by reference herein as if fully set forth. In the case of corn transformation, the preferred method is as described in either Ishida et al. (Nat. Biotechnol 14(6): 745-50, 1996) or Frame et al. (Plant Physiol 129(1): 13-22, 2002), which disclosures are incorporated by reference herein as if fully set forth. Said methods are further described by way of example in B. Jenes et al., Techniques for Gene Transfer, in: Transgenic Plants, Vol. 1, Engineering and Utilization, eds. S. D. Kung and R. Wu, Academic Press (1993) 128-143 and in Potrykus Annu. Rev. Plant Physiol. Plant Molec. Biol. 42 (1991) 205-225). The nucleic acids or the construct to be expressed is preferably cloned into a vector, which is suitable for transforming Agrobacterium tumefaciens, for example pBin19 (Bevan et al., Nucl. Acids Res. 12 (1984) 8711). Agrobacteria transformed by such a vector can then be used in known manner for the transformation of plants, such as plants used as a model, like Arabidopsis (Arabidopsis thaliana is within the scope of the present invention not considered as a crop plant), or crop plants such as, by way of example, tobacco plants, for example by immersing bruised leaves or chopped leaves in an agrobacterial solution and then culturing them in suitable media. The transformation of plants by means of Agrobacterium tumefaciens is described, for example, by Höfgen and Willmitzer in Nucl. Acid Res. (1988) 16, 9877 or is known inter alia from F. F. White, Vectors for Gene Transfer in Higher Plants; in Transgenic Plants, Vol. 1, Engineering and Utilization, eds. S. D. Kung and R. Wu, Academic Press, 1993, pp. 15-38.

[0392] In addition to the transformation of somatic cells, which then have to be regenerated into intact plants, it is also possible to transform the cells of plant meristems and in particular those cells which develop into gametes. In this case, the transformed gametes follow the natural plant development, giving rise to transgenic plants. Thus, for example, seeds of Arabidopsis are treated with agrobacteria and seeds are obtained from the developing plants of which a certain proportion is transformed and thus transgenic (Feldman, K A and Marks M D (1987). Mol Gen Genet 208:1-9; Feldmann K (1992). In: C Koncz, N-H Chua and J Shell, eds, Methods in Arabidopsis Research. Word Scientific, Singapore, pp. 274-289]. Alternative methods are based on the repeated removal of the inflorescences and incubation of the excision site in the center of the rosette with transformed agrobacteria, whereby transformed seeds can likewise be obtained at a later point in time (Chang (1994). Plant J. 5: 551-558; Katavic (1994). Mol Gen Genet, 245: 363-370). However, an especially effective method is the vacuum infiltration method with its modifications such as the “floral dip” method. In the case of vacuum infiltration of Arabidopsis, intact plants under reduced pressure are treated with an agrobacterial suspension (Bechthold, N (1993). C R Acad Sci Paris Life Sci, 316: 1194-1199), while in the case of the “floral dip” method the developing floral tissue is incubated briefly with a surfactant-treated agrobacterial suspension (Clough, S J and Bent A F (1998) The Plant J. 16, 735-743]. A certain proportion of transgenic seeds are harvested in both cases, and these seeds can be distinguished from non-transgenic seeds by growing under the above-described selective conditions. In addition the stable transformation of plastids is of advantages because plastids are inherited maternally is most crops reducing or eliminating the risk of transgene flow through pollen. The transformation of the chloroplast genome is generally achieved by a process which has been schematically displayed in Klaus et al., 2004 [Nature Biotechnology 22 (2), 225-229]. Briefly the sequences to be transformed are cloned together with a selectable marker gene between flanking sequences homologous to the chloroplast genome. These homologous flanking sequences direct site specific integration into the plastome. Plastidal transformation has been described for many different plant species and an overview is given in Bock (2001) Transgenic plastids in basic research and plant biotechnology. J Mol Biol. 2001 Sep. 21; 312 (3):425-38 or Maliga, P (2003) Progress towards commercialization of plastid transformation technology. Trends Biotechnol. 21, 20-28. Further biotechnological progress has recently been reported in form of marker free plastid transformants, which can be produced by a transient co-integrated maker gene (Klaus et al., 2004, Nature Biotechnology 22(2), 225-229). The genetically modified plant cells can be regenerated via all methods with which the skilled worker is familiar. Suitable methods can be found in the abovementioned publications by S. D. Kung and R. Wu, Potrykus or Hofgen and Willmitzer. Alternatively, the genetically modified plant cells are non-regenerable into a whole plant.

[0393] Generally after transformation, plant cells or cell groupings are selected for the presence of one or more markers which are encoded by plant-expressible genes co-transferred with the gene of interest, following which the transformed material is regenerated into a whole plant. To select transformed plants, the plant material obtained in the transformation is, as a rule, subjected to selective conditions so that transformed plants can be distinguished from untransformed plants. For example, the seeds obtained in the above-described manner can be planted and, after an initial growing period, subjected to a suitable selection by spraying. A further possibility consists in growing the seeds, if appropriate after sterilization, on agar plates using a suitable selection agent so that only the transformed seeds can grow into plants. Alternatively, the transformed plants are screened for the presence of a selectable marker such as the ones described herein.

[0394] Following DNA transfer and regeneration, putatively transformed plants may also be evaluated, for instance using Southern analysis, for the presence of the gene of interest, copy number and/or genomic organisation. Alternatively or additionally, expression levels of the newly introduced DNA may be monitored using Northern and/or Western analysis, both techniques being well known to persons having ordinary skill in the art.

[0395] The generated transformed plants may be propagated by a variety of means, such as by clonal propagation or classical breeding techniques. For example, a first generation (or T1) transformed plant may be selfed and homozygous second-generation (or T2) transformants selected, and the T2 plants may then further be propagated through classical breeding techniques. The generated transformed organisms may take a variety of forms. For example, they may be chimeras of transformed cells and non-transformed cells; clonal transformants (e.g., all cells transformed to contain the expression cassette); grafts of transformed and untransformed tissues (e.g., in plants, a transformed rootstock grafted to an untransformed scion).

[0396] Throughout this application a plant, plant part, seed or plant cell transformed with—or interchangeably transformed by—a construct or transformed with or by a nucleic acid is to be understood as meaning a plant, plant part, seed or plant cell that carries said construct or said nucleic acid as a transgene due the result of an introduction of this construct or this nucleic acid by biotechnological means. The plant, plant part, seed or plant cell therefore comprises this recombinant construct or this recombinant nucleic acid.

### T-DNA Activation Tagging

[0397] “T-DNA activation” tagging (Hayashi et al. Science (1992) 1350-1353), involves insertion of T-DNA, usually containing a promoter (may also be a translation enhancer or an intron), in the genomic region of the gene of interest or 10 kb up- or downstream of the coding region of a gene in a configuration such that the promoter directs expression of the targeted gene. Typically, regulation of expression of the targeted gene by its natural promoter is disrupted and the gene falls under the control of the newly introduced promoter. The promoter is typically embedded in a T-DNA. This T-DNA is randomly inserted into the plant genome, for example, through Agrobacterium infection and leads to modified expression of genes near the inserted T-DNA. The resulting transgenic plants show dominant phenotypes due to modified expression of genes close to the introduced promoter.

### TILLING

[0398] The term “TILLING” is an abbreviation of “Targeted Induced Local Lesions In Genomes” and refers to a mutagenesis technology useful to generate and/or identify nucleic acids encoding proteins with modified expression and/or activity. TILLING also allows selection of plants carrying such mutant variants. These mutant variants may exhibit modified expression, either in strength or in location or in timing (if the mutations affect the promoter for example). These mutant variants may exhibit higher activity than that exhibited by the gene in its natural form. TILLING combines high-density mutagenesis with high-throughput screening methods. The steps typically followed in TILLING are: (a) EMS mutagenesis (Redei G P and Koncz C (1992) In Methods in Arabidopsis Research, Koncz C, Chua N H, Schell J, eds. Singapore, World Scientific Publishing Co, pp. 16-82; Feldmann et al., (1994) In Meyerowitz E M, Somerville C R, eds, Arabidopsis. Cold Spring Harbor Laboratory Press, Cold Spring Harbor, N.Y., pp 137-172; Lightner J and Caspar T (1998) In J Martinez-Zapater, J Salinas, eds, Methods on Molecular Biology, Vol. 82. Humana Press, Totowa, N.J., pp 91-104); (b) DNA preparation and pooling of individuals; (c) PCR amplification of a region of interest; (d) denaturation and annealing to allow formation of heteroduplexes; (e) DHPLC, where the presence of a heteroduplex in a pool is detected as an extra peak in the chromatogram; (f) identification of the mutant individual; and (g) sequencing of the mutant PCR product. Methods for TILLING are well known in the art (McCallum et al., (2000) Nat Biotechnol 18: 455-457; reviewed by Stemple (2004) Nat Rev Genet 5(2): 145-50).

### Homologous Recombination

[0399] “Homologous recombination” allows introduction in a genome of a selected nucleic acid at a defined selected position. Homologous recombination is a standard technology used routinely in biological sciences for lower organisms such as yeast or the moss Physcomitrella. Methods for performing homologous recombination in plants have been described not only for model plants (Offringa et al. (1990) EMBO J 9(10): 3077-84) but also for crop plants, for example rice (Terada et al. (2002) Nat Biotech 20(10): 1030-4; lida and Terada (2004) Curr Opin Biotech 15(2): 132-8), and approaches exist that are generally applicable regardless of the target organism (Miller et al, Nature Biotechnol. 25, 778-785, 2007).

### Yield-Related Trait(s)

[0400] A “Yield related trait” is a trait or feature which is related to plant yield. Yield-related traits may comprise one or more of the following non-limitative list of features: early flowering time, yield, biomass, seed yield, early vigour, greenness index, growth rate, agronomic traits, such as e.g. tolerance to submergence (which leads to increased yield in rice), Water Use Efficiency (WUE), Nitrogen Use Efficiency (NUE), etc.

[0401] The term “one or more yield related traits” is to be understood to refer to one yield related trait, or two, or three, or four, or five, or six or seven or eight or nine or ten, or more than ten yield related traits of one plant compared with a control plant.

[0402] Reference herein to “enhanced yield-related trait” is taken to mean an increase relative to control plants in a yield-related trait, for instance in early vigour and/or in biomass, of a whole plant or of one or more parts of a plant, which may include (i) aboveground parts, preferably aboveground harvestable parts, and/or (ii) parts below ground, preferably harvestable parts below ground.

[0403] In particular, such harvestable parts are roots such as taproots, stems, beets, tubers, leaves, flowers or seeds.

[0404] Throughout the present application the tolerance of and/or the resistance to one or more agrochemicals by a plant, e.g. herbicide tolerance, is not considered a yield-related trait within the meaning of this term of the present application. An altered tolerance of and/or the resistance to one or more agrochemicals by a plant, e.g. improved herbicide tolerance, is not an “enhanced yield-related trait” as used throughout this application.

[0405] In a particular embodiment of the present invention, any reference to one or more enhanced yield-related trait(s) is meant to exclude the restoration of the expression and/or activity of the POI polypeptide in a plant in which the expression and/or the activity of the POI polypeptide has been reduced or disabled when compared to the original wildtype plant or original variety. For example, the overexpression of the POI polypeptide in a knock-out mutant variety of a plant, wherein said POI polypeptide or an orhtologue or paralogue has been knocked-out is not considered enhancing one or more yield-related trait(s) within the meaning of the current invention.

### Yield

[0406] The term “yield” in general means a measurable produce of economic value, typically related to a specified crop, to an area, and to a period of time. Individual plant parts directly contribute to yield based on their number, size and/or weight, or the actual yield is the yield per square meter for a crop and year, which is determined by dividing total production (includes both harvested and appraised production) by planted square meters.

[0407] The terms “yield” of a plant and “plant yield” are used interchangeably herein and are meant to refer to vegetative biomass such as root and/or shoot biomass, to reproductive organs, and/or to propagules such as seeds of that plant.

[0408] Flowers in maize are unisexual; male inflorescences (tassels) originate from the apical stem and female inflorescences (ears) arise from axillary bud apices. The female inflorescence produces pairs of spikelets on the surface of a central axis (cob). Each of the female spikelets encloses two fertile florets, one of them will usually mature into a maize kernel once fertilized. Hence a yield increase in maize may be manifested as one or more of the following: increase in the number of plants established per square meter, an increase in the number of ears per plant, an increase in the number of rows, number of kernels per row, kernel weight, thousand kernel weight, ear length/diameter, increase in the seed filling rate, which is the number of filled florets (i.e. florets containing seed) divided by the total number of florets and multiplied by 100), among others.

[0409] Inflorescences in rice plants are named panicles. The panicle bears spikelets, which are the basic units of the panicles, and which consist of a pedicel and a floret. The floret is borne on the pedicel and includes a flower that is covered by two protective glumes: a larger glume (the lemma) and a shorter glume (the palea). Hence, taking rice as an example, a yield increase may manifest itself as an increase in one or more of the following: number of plants per square meter, number of panicles per plant, panicle length, number of spikelets per panicle, number of flowers (or florets) per panicle; an increase in the seed filling rate which is the number of filled florets (i.e. florets containing seeds) divided by the total number of florets and multiplied by 100; an increase in thousand kernel weight, among others.

### Early Flowering Time

[0410] Plants having an “early flowering time” as used herein are plants which start to flower earlier than control plants. Hence this term refers to plants that show an earlier start of flowering. Flowering time of plants can be assessed by counting the number of days (“time to flower”) between sowing and the emergence of a first inflorescence. The “flowering time” of a plant can for instance be determined using the method as described in WO 2007/093444.

### Early Vigour

[0411] “Early vigour” refers to active healthy well-balanced growth especially during early stages of plant growth, and may result from increased plant fitness due to, for example, the plants being better adapted to their environment (i.e. optimizing the use of energy resources and partitioning between shoot and root). Plants having early vigour also show increased seedling survival and a better establishment of the crop, which often results in highly uniform fields (with the crop growing in uniform manner, i.e. with the majority of plants reaching the various stages of development at substantially the same time), and often better and higher yield. Therefore, early vigour may be determined by measuring various factors, such as thousand kernel weight, percentage germination, percentage emergence, seedling growth, seedling height, root length, root and shoot biomass and many more.

### Increased Growth Rate

[0412] The increased growth rate may be specific to one or more parts of a plant (including seeds), or may be throughout substantially the whole plant. Plants having an increased growth rate may have a shorter life cycle. The life cycle of a plant may be taken to mean the time needed to grow from a mature seed up to the stage where the plant has produced mature seeds, similar to the starting material. This life cycle may be influenced by factors such as speed of germination, early vigour, growth rate, greenness index, flowering time and speed of seed maturation. The increase in growth rate may take place at one or more stages in the life cycle of a plant or during substantially the whole plant life cycle. Increased growth rate during the early stages in the life cycle of a plant may reflect enhanced vigour. The increase in growth rate may alter the harvest cycle of a plant allowing plants to be sown later and/or harvested sooner than would otherwise be possible (a similar effect may be obtained with earlier flowering time). If the growth rate is sufficiently increased, it may allow for the further sowing of seeds of the same plant species (for example sowing and harvesting of rice plants followed by sowing and harvesting of further rice plants all within one conventional growing period). Similarly, if the growth rate is sufficiently increased, it may allow for the further sowing of seeds of different plants species (for example the sowing and harvesting of corn plants followed by, for example, the sowing and optional harvesting of soybean, potato or any other suitable plant). Harvesting additional times from the same rootstock in the case of some crop plants may also be possible. Altering the harvest cycle of a plant may lead to an increase in annual biomass production per square meter (due to an increase in the number of times (say in a year) that any particular plant may be grown and harvested). An increase in growth rate may also allow for the cultivation of transgenic plants in a wider geographical area than their wild-type counterparts, since the territorial limitations for growing a crop are often determined by adverse environmental conditions either at the time of planting (early season) or at the time of harvesting (late season). Such adverse conditions may be avoided if the harvest cycle is shortened. The growth rate may be determined by deriving various parameters from growth curves, such parameters may be: T-Mid (the time taken for plants to reach 50% of their maximal size) and T-90 (time taken for plants to reach 90% of their maximal size), amongst others.

### Stress Resistance

[0413] An increase in yield and/or growth rate occurs whether the plant is under non-stress conditions or whether the plant is exposed to various stresses compared to control plants. Plants typically respond to exposure to stress by growing more slowly. In conditions of severe stress, the plant may even stop growing altogether. Mild stress on the other hand is defined herein as being any stress to which a plant is exposed which does not result in the plant ceasing to grow altogether without the capacity to resume growth. Mild stress in the sense of the invention leads to a reduction in the growth of the stressed plants of less than 40%, 35%, 30% or 25%, more preferably less than 20% or 15% in comparison to the control plant under non-stress conditions. Due to advances in agricultural practices (irrigation, fertilization, pesticide treatments) severe stresses are not often encountered in cultivated crop plants. As a consequence, the compromised growth induced by mild stress is often an undesirable feature for agriculture.

[0414] “Biotic stress” is understood as the negative impact done to plants by other living organisms, such as bacteria, viruses, fungi, nematodes, insects, other animals or other plants. “Biotic stresses” are typically those stresses caused by pathogens, such as bacteria, viruses, fungi, plants, nematodes and insects, or other animals, which may result in negative effects on plant growth and/or yield.

[0415] “Abiotic stress” is understood as the negative impact of non-living factors on the living plant in a specific environment. Abiotic stresses or environmental stresses may be due to drought or excess water, anaerobic stress, salt stress, chemical toxicity, oxidative stress and hot, cold or freezing temperatures. The “abiotic stress” may be an osmotic stress caused by a water stress, e.g. due to drought, salt stress, or freezing stress. Abiotic stress may also be an oxidative stress or a cold stress. “Freezing stress” is intended to refer to stress due to freezing temperatures, i.e. temperatures at which available water molecules freeze and turn into ice. “Cold stress”, also called “chilling stress”, is intended to refer to cold temperatures, e.g. temperatures below 10°, or preferably below 5° C., but at which water molecules do not freeze. As reported in Wang et al. (Planta (2003) 218: 1-14), abiotic stress leads to a series of morphological, physiological, biochemical and molecular changes that adversely affect plant growth and productivity. Drought, salinity, extreme temperatures and oxidative stress are known to be interconnected and may induce growth and cellular damage through similar mechanisms. Rabbani et al. (Plant Physiol (2003) 133: 1755-1767) describes a particularly high degree of “cross talk” between drought stress and high-salinity stress. For example, drought and/or salinisation are manifested primarily as osmotic stress, resulting in the disruption of homeostasis and ion distribution in the cell. Oxidative stress, which frequently accompanies high or low temperature, salinity or drought stress, may cause denaturing of functional and structural proteins. As a consequence, these diverse environmental stresses often activate similar cell signalling pathways and cellular responses, such as the production of stress proteins, up-regulation of anti-oxidants, accumulation of compatible solutes and growth arrest. The term “non-stress” conditions as used herein are those environmental conditions that allow optimal growth of plants. Persons skilled in the art are aware of normal soil conditions and climatic conditions for a given location. Plants with optimal growth conditions, (grown under non-stress conditions) typically yield in increasing order of preference at least 97%, 95%, 92%, 90%, 87%, 85%, 83%, 80%, 77% or 75% of the average production of such plant in a given environment. Average production may be calculated on harvest and/or season basis. Persons skilled in the art are aware of average yield productions of a crop.

### Increase/Improve/Enhance

[0416] The terms “increase”, “improve” or “enhance” in the context of a yield-related trait are interchangeable and shall mean in the sense of the application at least a 3%, 4%, 5%, 6%, 7%, 8%, 9% or 10%, preferably at least 15% or 20%, more preferably 25%, 30%, 35% or 40% increase in the yield-related trait(s) (such as but not limited to more yield and/or growth) in comparison to control plants as defined herein.

### Seed Yield

[0417] Increased seed yield may manifest itself as one or more of the following:
[0418] a) an increase in seed biomass (total seed weight) which may be on an individual seed basis and/or per plant and/or per square meter;
[0419] b) increased number of flowers per plant;
[0420] c) increased number of seeds;
[0421] d) increased seed filling rate (which is expressed as the ratio between the number of filled florets divided by the total number of florets);
[0422] e) increased harvest index, which is expressed as a ratio of the yield of harvestable parts, such as seeds, divided by the biomass of aboveground plant parts; and
[0423] f) increased thousand kernel weight (TKW), which is extrapolated from the number of seeds counted and their total weight. An increased TKW may result from an increased seed size and/or seed weight, and may also result from an increase in embryo and/or endosperm size.

[0424] The terms “filled florets” and “filled seeds” may be considered synonyms.

[0425] An increase in seed yield may also be manifested as an increase in seed size and/or seed volume. Furthermore, an increase in seed yield may also manifest itself as an increase in seed area and/or seed length and/or seed width and/or seed perimeter.

### Greenness Index

[0426] The “greenness index” as used herein is calculated from digital images of plants. For each pixel belonging to the plant object on the image, the ratio of the green value versus the red value (in the RGB model for encoding color) is calculated. The greenness index is expressed as the percentage of pixels for which the green-to-red ratio exceeds a given threshold. Under normal growth conditions, under salt stress growth conditions, and under reduced nutrient availability growth conditions, the greenness index of plants is measured in the last imaging before flowering. In contrast, under drought stress growth conditions, the greenness index of plants is measured in the first imaging after drought.

### Biomass

[0427] The term “biomass” as used herein is intended to refer to the total weight of a plant or plant part. Total weight can be measured as dry weight, fresh weight or wet weight. Within the definition of biomass, a distinction may be made between the biomass of one or more parts of a plant, which may include any one or more of the following:
[0428] aboveground parts such as but not limited to shoot biomass, seed biomass, leaf biomass, etc.;
[0429] aboveground harvestable parts such as but not limited to shoot biomass, seed biomass, leaf biomass, stem biomass, setts etc.;
[0430] parts below ground, such as but not limited to root biomass, tubers, bulbs, etc.;
[0431] harvestable parts below ground, such as but not limited to root biomass, tubers, bulbs, etc.,
[0432] harvestable parts partially below ground such as but not limited to beets and other hypocotyl areas of a plant, rhizomes, stolons or creeping rootstalks;
[0433] vegetative biomass such as root biomass, shoot biomass, etc.;
[0434] reproductive organs; and
[0435] propagules such as seed.

[0436] In a preferred embodiment throughout this application any reference to “root” as biomass or as harvestable parts or as organ e.g. of increased sugar content is to be understood as a reference to harvestable parts partly inserted in or in physical contact with the ground such as but not limited to beets and other hypocotyl areas of a plant, rhizomes, stolons or creeping rootstalks, but not including leaves, as well as harvestable parts belowground, such as but not limited to root, taproot, tubers or bulbs.

[0437] In another embodiment aboveground parts or aboveground harvestable parts or above-ground biomass are to be understood as aboveground vegetative biomass not including seeds and/or fruits.

### Marker Assisted Breeding

[0438] Such breeding programmes sometimes require introduction of allelic variation by mutagenic treatment of the plants, using for example EMS mutagenesis; alternatively, the programme may start with a collection of allelic variants of so called “natural” origin caused unintentionally. Identification of allelic variants then takes place, for example, by PCR. This is followed by a step for selection of superior allelic variants of the sequence in question and which give increased yield. Selection is typically carried out by monitoring growth performance of plants containing different allelic variants of the sequence in question. Growth performance may be monitored in a greenhouse or in the field. Further optional steps include crossing plants in which the superior allelic variant was identified with another plant. This could be used, for example, to make a combination of interesting phenotypic features.

### Use as Probes in (Gene Mapping)

[0439] Use of nucleic acids encoding the protein of interest for genetically and physically mapping the genes requires only a nucleic acid sequence of at least 15 nucleotides in length. These nucleic acids may be used as restriction fragment length polymorphism (RFLP) markers. Southern blots (Sambrook J, Fritsch E F and Maniatis T (1989) Molecular Cloning, A Laboratory Manual) of restriction-digested plant genomic DNA may be probed with the nucleic acids encoding the protein of interest. The resulting banding patterns may then be subjected to genetic analyses using computer programs such as MapMaker (Lander et al. (1987) Genomics 1: 174-181) in order to construct a genetic map. In addition, the nucleic acids may be used to probe Southern blots containing restriction endonuclease-treated genomic DNAs of a set of individuals representing parent and progeny of a defined genetic cross. Segregation of the DNA polymorphisms is noted and used to calculate the position of the nucleic acid encoding the protein of interest in the genetic map previously obtained using this population (Botstein et al. (1980) Am. J. Hum. Genet. 32:314-331).

[0440] The production and use of plant gene-derived probes for use in genetic mapping is described in Bernatzky and Tanksley (1986) Plant Mol. Biol. Reporter 4: 37-41. Numerous publications describe genetic mapping of specific cDNA clones using the methodology outlined above or variations thereof. For example, F2 intercross populations, backcross populations, randomly mated populations, near isogenic lines, and other sets of individuals may be used for mapping. Such methodologies are well known to those skilled in the art.

[0441] The nucleic acid probes may also be used for physical mapping (i.e., placement of sequences on physical maps; see Hoheisel et al. In: Non-mammalian Genomic Analysis: A Practical Guide, Academic press 1996, pp. 319-346, and references cited therein).

[0442] In another embodiment, the nucleic acid probes may be used in direct fluorescence in situ hybridisation (FISH) mapping (Trask (1991) Trends Genet. 7:149-154). Although current methods of FISH mapping favour use of large clones (several kb to several hundred kb; see Laan et al. (1995) Genome Res. 5:13-20), improvements in sensitivity may allow performance of FISH mapping using shorter probes.

[0443] A variety of nucleic acid amplification-based methods for genetic and physical mapping may be carried out using the nucleic acids. Examples include allele-specific amplification (Kazazian (1989) J. Lab. Clin. Med 11:95-96), polymorphism of PCR-amplified fragments (CAPS; Sheffield et al. (1993) Genomics 16:325-332), allele-specific ligation (Landegren et al. (1988) Science 241:1077-1080), nucleotide extension reactions (Sokolov (1990) Nucleic Acid Res. 18:3671), Radiation Hybrid Mapping (Walter et al. (1997) Nat. Genet. 7:22-28) and Happy Mapping (Dear and Cook (1989) Nucleic Acid Res. 17:6795-6807). For these methods, the sequence of a nucleic acid is used to design and produce primer pairs for use in the amplification reaction or in primer extension reactions. The design of such primers is well known to those skilled in the art. In methods employing PCR-based genetic mapping, it may be necessary to identify DNA sequence differences between the parents of the mapping cross in the region corresponding to the instant nucleic acid sequence. This, however, is generally not necessary for mapping methods.

### Plant

[0444] The term “plant” as used herein encompasses whole plants, ancestors and progeny of the plants and plant parts, including seeds, shoots, stems, leaves, roots (including tubers), flowers, and tissues and organs, wherein each of the aforementioned comprise the gene/nucleic acid of interest. The term “plant” also encompasses plant cells, suspension cultures, callus tissue, embryos, meristematic regions, gametophytes, sporophytes, pollen and microspores, again wherein each of the aforementioned comprises the gene/nucleic acid of interest.

[0445] Plants that are particularly useful in the methods of the invention include all plants which belong to the superfamily Viridiplantae, in particular monocotyledonous and dicotyledonous plants including fodder or forage legumes, ornamental plants, food crops, trees or shrubs selected from the list comprising Acer spp., Actinidia spp., Abelmoschus spp., Agave sisalana, Agropyron spp., Agrostis stolonifera, Allium spp., Amaranthus spp., Ammophila arenaria, Ananas comosus, Annona spp., Apium graveolens, Arachis spp, Artocarpus spp., Asparagus officinalis, Avena spp. (e.g. Avena sativa, Avena fatua, Avena byzantina, Avena fatua var. sativa, Avena hybrida), Averrhoa carambola, Bambusa sp., Benincasa hispida, Bertholletia excelsea, Beta vulgaris, Brassica spp. (e.g. Brassica napus, Brassica rapa ssp. [canola, oilseed rape, turnip rape]), Cadaba farinosa, Camellia sinensis, Canna indica, Cannabis sativa, Capsicum spp., Carex elata, Carica papaya, Carissa macrocarpa, Carya spp., Carthamus tinctorius, Castanea spp., Ceiba pentandra, Cichorium endivia, Cinnamomum spp., Citrullus lanatus, Citrus spp., Cocos spp., Coffea spp., Colocasia esculents, Cola spp., Corchorus sp., Coriandrum sativum, Corylus spp., Crataegus spp., Crocus sativus, Cucurbita spp., Cucumis spp., Cynara spp., Daucus carota, Desmodium spp., Dimocarpus longan, Dioscorea spp., Diospyros spp., Echinochloa spp., Elaeis (e.g. Elaeis guineensis, Elaeis oleifera), Eleusine coracana, Eragrostis tef, Erianthus sp., Eriobotrya japonica, Eucalyptus sp., Eugenia uniflora, Fagopyrum spp., Fagus spp., Festuca arundinacea, Ficus carica, Fortunella spp., Fragaria spp., Ginkgo biloba, Glycine spp. (e.g. Glycine max, Soja hispida or Soja max), Gossypium hirsutum, Helianthus spp. (e.g. Helianthus annuus), Hemerocallis fulva, Hibiscus spp., Hordeum spp. (e.g. Hordeum vulgare), Ipomoea batatas, Juglans spp., Lactuca sativa, Lathyrus spp., Lens culinaris, Linum usitatissimum, Litchi chinensis, Lotus spp., Luffa acutangula, Lupinus spp., Luzula sylvatica, Lycopersicon spp. (e.g. Lycopersicon esculentum, Lycopersicon lycopersicum, Lycopersicon pyriforme), Macrotyloma spp., Malus spp., Malpighia emarginata, Mammea americana, Mangifera indica, Manihot spp., Manilkara zapota, Medicago sativa, Melilotus spp., Mentha spp., Miscanthus sinensis, Momordica spp., Morus nigra, Musa spp., Nicotiana spp., Olea spp., Opuntia spp., Ornithopus spp., Oryza spp. (e.g. Oryza sativa, Oryza latifolia), Panicum miliaceum, Panicum virgatum, Passiflora edulis, Pastinaca sativa, Pennisetum sp., Persea spp., Petroselinum crispum, Phalaris arundinacea, Phaseolus spp., Phleum pratense, Phoenix spp., Phragmites australis, Physalis spp., Pinus spp., Pistacia vera, Pisum spp., Poa spp., Populus spp., Prosopis spp., Prunus spp., Psidium spp., Punica granatum, Pyrus communis, Quercus spp., Raphanus sativus, Rheum rhabarbarum, Ribes spp., Ricinus communis, Rubus spp., Saccharum spp., Salix sp., Sambucus spp., Secale cereale, Sesamum spp., Sinapis sp., Solanum spp. (e.g. Solanum tuberosum, Solanum integrifolium or Solanum lycopersicum), Sorghum bicolor, Spinacia spp., Syzygium spp., Tagetes spp., Tamarindus indica, Theobroma cacao, Trifolium spp., Tripsacum dactyloides, Triticosecale rimpaui, Triticum spp. (e.g. Triticum aestivum, Triticum durum, Triticum turgidum, Triticum hybernum, Triticum macha, Triticum sativum, Triticum monococcum or Triticum vulgare), Tropaeolum minus, Tropaeolum majus, Vaccinium spp., Vicia spp., Vigna spp., Viola odorata, Vitis spp., Zea mays, Zizania palustris, Ziziphus spp., amongst others.

### Control Plant(s)

[0446] The choice of suitable control plants is a routine part of an experimental setup and may include corresponding wild type plants or corresponding plants without the gene of interest. The control plant is typically of the same plant species or even of the same variety as the plant to be assessed. The control plant may also be a nullizygote of the plant to be assessed. Nullizygotes (or null control plants) are individuals missing the transgene by segregation. Further, control plants are grown under equal growing conditions to the growing conditions of the plants of the invention, i.e. in the vicinity of, and simultaneously with, the plants of the invention. A “control plant” as used herein refers not only to whole plants, but also to plant parts, including seeds and seed parts.

### Propagation Material/Propagule

[0447] “Propagation material” or “propagule” is any kind of organ, tissue, or cell of a plant capable of developing into a complete plant. “Propagation material” can be based on vegetative reproduction (also known as vegetative propagation, vegetative multiplication, or vegetative cloning) or sexual reproduction. Propagation material can therefore be seeds or parts of the non-reproductive organs, like stem or leave. In particular, with respect to poaceae, suitable propagation material can also be sections of the stem, i.e., stem cuttings (like setts).

### Stalk

[0448] A “stalk” is the stem of a plant belonging the Poaceae, and is also known as the “millable cane”. In the context of poaceae “stalk”, “stem”, “shoot”, or “tiller” are used interchangeably.

### Sett

[0449] A “sett” is a section of the stem of a plant from the Poaceae, which is suitable to be used as propagation material. Synonymous expressions to “sett” are “seed-cane”, “stem cutting”, “section of the stalk”, and “seed piece”.

### DESCRIPTION OF FIGURES

[0450] Throughout the figures, for each sequence of table A the shortname given in table A below is used to represent the sequence.

[0451] The present invention will now be described with reference to the following figures in which:

[0452] FIG. 1 summarises the positions within the sequence of SEQ ID NO: 2 of A. the identified motifs 1 to 6 (CLP_PATTERN_{—}01 to CLP_PATTERN_{—}06), and their corresponding SEQ ID Nos.; and B. of the three consensus motifs with their starting and ending amino acid residue in SEQ ID NO: 2; and C. of the PFAM domain PF02861 in the amino acid sequence as provided in SEQ ID NO: 2. Interestingly, the N-terminal part of the domain PF02861 finds a match near the N-terminus of this CLP protein while the C-terminal part of the domain PF02861 finds a match C-terminally to this as indicated by the given positions for SEQ ID NO: 2

[0453] FIG. 2 represents a multiple alignment of various POI polypeptides. Black shading indicates identical amino acids among the various protein sequences, grey shading represent highly conserved amino acid substitutions, i.e. at least 80% conserved residue, on other positions there is no sequence conservation. These alignments can be used for defining further motifs or signature sequences, when using conserved amino acids.

[0454] FIG. 3 shows phylogenetic tree of CLP polypeptides, using AlignX from the VectorNTI suite software from Invitrogen; see example 3 for details.

[0455] FIG. 4 shows the sequence similarity and identity table of Example 3.

[0456] FIG. 5 represents the binary vector used for increased expression in Oryza sativa of a POI-encoding nucleic acid under the control of a rice GOS2 promoter (pGOS2).

[0457] FIG. 6 CLP summarises the relations of the different SEQ ID NOs. to the lead sequence.

[0458] FIG. 7 shows the results of an InterProScan analysis of SEQ ID NO: 2; see example 4 for details.

### EXAMPLES

[0459] The present invention will now be described with reference to the following examples, which are by way of illustration only. The following examples are not intended to limit the scope of the invention.

[0460] In particular, the plants used in the described experiments are used because Arabidopsis, tobacco, rice and corn plants are model plants for the testing of transgenes. They are widely used in the art for the relative ease of testing while having a good transferability of the results to other plants used in agriculture, such as but not limited to maize, wheat, rice, soybean, cotton, oilseed rape including canola, sugarcane, sugar beet and alfalfa, or other dicot or monocot crops. Unless otherwise indicated, the present invention employs conventional techniques and methods of plant biology, molecular biology, bioinformatics and plant breedings.

[0461] DNA manipulation: unless otherwise stated, recombinant DNA techniques are performed according to standard protocols described in (Sambrook (2001) Molecular Cloning: a laboratory manual, 3rd Edition Cold Spring Harbor Laboratory Press, CSH, New York) or in Volumes 1 and 2 of Ausubel et al. (1994), Current Protocols in Molecular Biology, Current Protocols. Standard materials and methods for plant molecular work are described in Plant Molecular Biology Labfax (1993) by R. D. D. Croy, published by BIOS Scientific Publications Ltd (UK) and Blackwell Scientific Publications (UK).

### Example 1

### Identification of Sequences Related to SEQ ID NO: 1 and SEQ ID NO: 2

[0462] Sequences (full length cDNA, ESTs or genomic) related to SEQ ID NO: 1 and SEQ ID NO: 2 were identified amongst those maintained in the Entrez Nucleotides database at the National Center for Biotechnology Information (NCBI) using database sequence search tools, such as the Basic Local Alignment Tool (BLAST) (Altschul et al. (1990) J. Mol. Biol. 215:403-410; and Altschul et al. (1997) Nucleic Acids Res. 25:3389-3402). The program is used to find regions of local similarity between sequences by comparing nucleic acid or polypeptide sequences to sequence databases and by calculating the statistical significance of matches. For example, the polypeptide encoded by the nucleic acid of SEQ ID NO: 1 was used for the TBLASTN algorithm, with default settings and the filter to ignore low complexity sequences set off. The output of the analysis was viewed by pairwise comparison, and ranked according to the probability score (E-value), where the score reflect the probability that a particular alignment occurs by chance (the lower the E-value, the more significant the hit). In addition to E-values, comparisons were also scored by percentage identity. Percentage identity refers to the number of identical nucleotides (or amino acids) between the two compared nucleic acid (or polypeptide) sequences over a particular length. In some instances, the default parameters may be adjusted to modify the stringency of the search. For example the E-value may be increased to show less stringent matches. This way, short nearly exact matches may be identified.

[0463] Table A provides a list of nucleic acid sequences related to SEQ ID NO: 1 and SEQ ID NO: 2.

TABLE A
Examples of CLP encoding nucleic acids and polypeptides:

| | Nucleic acid | Protein | Short name |
|---|---|---|---|
| Organism | SEQ ID NO: | SEQ ID NO: | in FIGS. |
| Arabidopsis thaliana | 1 | 2 | L |
| Zea mays | 3 | 4 | H_45 |
| Glycine max | 5 | 6 | H_21 |
| Glycine max | 7 | 8 | H_19 |
| Zea mays | 9 | 10 | H_34 |
| Zea mays | 11 | 12 | H_25 |
| Glycine max | 13 | 14 | H_10 |
| Glycine max | 15 | 16 | H_9 |
| Glycine max | 17 | 18 | H_22 |
| Glycine max | 19 | 20 | H_17 |
| Glycine max | 21 | 22 | H_16 |
| Medicago truncatula | 23 | 24 | H_20 |
| Glycine max | 25 | 26 | H_27 |
| Oryza sativa | 27 | 28 | H_38 |
| Populus trichocarpa | 29 | 30 | H_5 |
| Populus trichocarpa | 31 | 32 | H_12 |
| Populus trichocarpa | 33 | 34 | H_8 |
| Sorghum bicolor | 35 | 36 | H_32 |
| Sorghum bicolor | 37 | 38 | H_43 |
| Sorghum bicolor | 39 | 40 | H_30 |
| Sorghum bicolor | 41 | 42 | H_47 |
| Zea mays | 43 | 44 | H_36 |
| Zea mays | 45 | 46 | H_37 |
| Vitis vinifera | 47 | 48 | H_11 |
| Vitis vinifera | 49 | 50 | H_4 |
| Ricinus communis | 51 | 52 | H_18 |
| Ricinus communis | 53 | 54 | H_7 |
| Vitis vinifera | 55 | 56 | H_6 |
| Vitis vinifera | 57 | 58 | H_15 |
| Oryza sativa subsp. indica | 59 | 60 | H_39 |
| Hordeum vulgare var. | 61 | 62 | H_42 |
| distichum | | | |
| Vitis vinifera | 63 | 64 | H_14 |
| Vitis vinifera | 65 | 66 | H_3 |
| Oryza sativa | 67 | 68 | H_29 |
| Arabidopsis thaliana | 69 | 70 | H_2 |
| Oryza sativa subsp. japonica | 71 | 72 | H_41 |
| synthetic CLP Variant 1 | 86 | 87 | |
| synthetic CLP Variant 2 | 88 | 89 | |
| synthetic CLP Variant 3 | 90 | 91 | |
| synthetic CLP Variant 4 | 92 | 93 | |
| synthetic CLP Variant 5 | 94 | 95 | |
| synthetic CLP Variant 6 | 96 | 97 | |
| synthetic CLP Variant 7 | 98 | 99 | |
| synthetic CLP Variant 8 | 100 | 101 | |
| synthetic CLP Variant 9 | 102 | 103 | |
| synthetic CLP Variant 10 | 104 | 105 | |

[0464] The polypeptide sequences of SEQ ID NO: 87, 89, 91, 93, 95, 97, 99, 101, 103 and 105 were artificially designed using SEQ ID NO: 2 as a starting point. They share approximately 70, 75, 80, 85, 90, 92, 95, 96, 97 and 98 percent identity with the sequence of SEQ ID NO: 2, respectively. SEQ ID NO: 86, 88, 90, 92, 94, 96, 98, 100, 102 and 104 are examples of nucleic acid sequences encoding the polypeptides of SEQ ID NO: 87, 89, 91, 93, 95, 97, 99, 101, 103 and 105, respectively.

[0465] Sequences have been tentatively assembled and publicly disclosed by research institutions, such as The Institute for Genomic Research (TIGR; beginning with TA). For instance, the Eukaryotic Gene Orthologs (EGO) database may be used to identify such related sequences, either by keyword search or by using the BLAST algorithm with the nucleic acid sequence or polypeptide sequence of interest. Special nucleic acid sequence databases have been created for particular organisms, e.g. for certain prokaryotic organisms, such as by the Joint Genome Institute. Furthermore, access to proprietary databases, has allowed the identification of novel nucleic acid and polypeptide sequences.

### Example 2

### Alignment of POI Polypeptide Sequences

[0466] The alignment was performed with the software ClustalW (version 1.83) and is described by Thompson et al. (Nucleic Acids Research 22, 4673 (1994)). The source code for the stand-alone program is publicly available from the European Molecular Biology Laboratory; Heidelberg, Germany. The analysis was performed using the default parameters of ClustalW v1.83 (gap open penalty: 10.0; gap extension penalty: 0.2; protein matrix: Gonnet; protein/DNA endgap: −1; protein/DNA gapdist: 4).

[0467] Minor manual editing was done to further optimise the alignment. The POI polypeptides are aligned in FIG. 2.

[0468] A phylogenetic tree of CLP polypeptides (FIG. 3) was constructed by aligning POI sequences using AlignX of the VectorNTI software suite (Invitrogen, part of Life Technologies GmbH, Frankfurter Straβe 129B, 64293 Darmstadt, Germany) with standard settings. The guide tree produced during ClustalW-alignment (parameters as shown above) was used: The multiple sequence alignment (*.msf-file) and the guide tree (*.dnd) file produced by ClustalW where merged and exported to one unified msf-file using program “GeneDoc” (Nicholas, Karl B., and Nichloas, Hugh B. Jr., 1997, “GeneDoc: a tool for editing and annotating multiple sequence alignments”, available at http://www.nrbsc.org/gfx/genedoc/). For visualization of the phylogenetic tree, the resulting msf file (containing the multiple sequence alignment and the guide tree information) was imported to AlignX (Vector NTI Advance 11.5.1, Invitrogen 2011).

### Example 3

### Calculation of Global Percentage Identity Between Polypeptide Sequences

[0469] Global percentages of similarity and identity between full length polypeptide sequences useful in performing the methods of the invention were determined program “needle” from the EMBOSS software collection, version number 6.3.1.2 (The European Molecular Biology Open Software Suite; http://www.ebi.ac.uk/Tools/psa/; see McWilliam H., Valentin F., Goujon M., Li W., Naraya-nasamy M., Martin J., Miyar T. and Lopez R. (2009), Web services at the European Bioinformatics Institute—2009, Nucleic Acids Research 37: W6-W10; available from EMBL European Bioinformatics Institute, EMBL-EBI, Wellcome Trust Genome Campus, Hinxton, Cambridge, CB10 1 SD, UK, and http://emboss.sourceforge.net/). Results of the analysis are shown in FIG. 4 with global similarity and identity percentages over the full length of the polypeptide sequences. Sequence similarity is shown in the bottom half of the dividing line and sequence identity is shown in the top half of the diagonal dividing line. Parameters used in the analysis were: −gapopen 10.0, −gapextend 0.5, matrix: BLOSUM62. The sequence identity (in %) between the CLP polypeptide sequences useful in performing the methods of the invention can be as low as 35%, but is generally higher than 40%) compared to SEQ ID NO: 2.

[0470] Based on a multiple alignment of CLP polypeptides, such as for example the one of Example 2, a skilled person may select conserved sequences and submit as input for a similarity/identity analysis. This approach is useful where overall sequence conservation among CLP proteins is rather low.

### Example 4

### Identification of Motifs and Domains Comprised in Polypeptide Sequences Useful in Performing the Methods of the Invention

[0471] The Integrated Resource of Protein Families, Domains and Sites (InterPro) database is an integrated interface for the commonly used signature databases for text- and sequencebased searches. The InterPro database combines these databases, which use different methodologies and varying degrees of biological information about well-characterized proteins to derive protein signatures. Collaborating databases include SWISS-PROT, PROSITE, TrEMBL, PRINTS, ProDom and Pfam, Smart and TIGRFAMs. Pfam is a large collection of multiple sequence alignments and hidden Markov models covering many common protein domains and families. Pfam is hosted at the Sanger Institute server in the United Kingdom. Interpro is hosted at the European Bioinformatics Institute in the United Kingdom.

[0472] The results of the InterProScan ((see Zdobnov E. M. and Apweiler R.; “InterProScan—an integration platform for the signature-recognition methods in InterPro.”; Bioinformatics, 2001, 17(9): 847-8; InterPro database, release 37.0, 30 Apr., 2012) of the polypeptide sequence as represented by SEQ ID NO: 2 are presented in Table B1.

[0473] A repeat analysis using InterProScan v4.8 & the InterPro database release 41.0, 13 Feb. 2013 produced the results shown in table B2.

TABLE B1
InterProScan results (major accession numbers) of the polypeptide
sequence as represented by SEQ ID NO: 2. Default parameters (DB
genetic code = standard; transcript length = 20) were used.

| Database | Accession | Accession | Amino acid coordinates |
|---|---|---|---|
| or method | number | name | on SEQ ID NO 2 |
| PFAM | PF02861 | ClpA domain, | 23 or 24 to 53, 54 or 55, |
| | | N-terminal | preferably residues 23 to 55, |
| | | | and 130 or 131 to 168 or 169, |
| | | | preferably residues 130 to 169 |
| Interpro | IPR004176 | Clp, | 23 or 24 to 53, 54 or 55, |
| | | N-terminal | preferably residues 23 to 55, |
| | | | and 130 or 131 to 168 or 169, |
| | | | preferably residues 130 to 169 |
| Interpro | IPR023150 | Double | 11-166 |
| | | Clp-N motif | |

TABLE B2
InterProScan results (major accession numbers) of the polypeptide
sequence as represented by SEQ ID NO: 2. Default parameters (DB
genetic code = standard; transcript length = 20) were used.

| Database or | Accession | Accession | Amino acid coordinates |
|---|---|---|---|
| method | number | name | on SEQ ID NO 2 |
| PFAM | PF02861 | ClpA domain, | 24-53 & 131-168 |
| | | N-terminal | |
| Interpro | IPR004176 | Clp, N-terminal | 24-53 & 131-168 |
| Interpro | IPR023150 | Double Clp-N motif | 11-167 |
| GENE3D | G3DSA: 1.10.1780.10 | | 11-167 |
| GENE3D | G3DSA: 3.40.50.300 | | 578-743 |
| PANTHER | PTHR11638 | ATP-DEPENDENT | 561-745 |
| | | CLP PROTEASE | |
| SUPERFAMILY | SSF52540 | P-loop containing | 561-745 |
| | | nucleoside triphosphate | |
| | | hydrolases | |
| SUPERFAMILY | SSF81923 | Double Clp-N motif | 10-166 |

[0474] In one embodiment a POI polypeptide comprises a conserved domain with at least 70%, 71%, 72%, 73%, 74%, 75%, 76%, 77%, 78%, 79%, 80%, 81%, 82%, 83%, 84%, 85%, 86%, 87%, 88%, 89%, 90%, 91%, 92%, 93%, 94%, 95%, 96%, 97%, 98%, or 99% sequence identity to a conserved domain from amino acid 11 to 166 in SEQ ID NO:2.

### Identification of Conserved Motifs

[0475] Conserved patterns were identified with the software tool MEME version 3.5. MEME was developed by Timothy L. Bailey and Charles Elkan, Dept. of Computer Science and Engineering, University of California, San Diego, USA and is described by Timothy L. Bailey and Charles Elkan (Fitting a mixture model by expectation maximization to discover motifs in biopolymers, Proceedings of the Second International Conference on Intelligent Systems for Molecular Biology, pp. 28-36, AAAI Press, Menlo Park, Calif., 1994). The source code for the stand-alone program is public available from the San Diego Supercomputer centercentre (http://meme.sdsc.edu).

[0476] For identifying common motifs in all sequences with the software tool MEME, the following settings were used: −maxsize 500000, −nmotifs 15, −evt 0.001, −maxw 60, −distance 1 e-3, −minsites number of sequences used for the analysis. Input sequences for MEME were nonaligned sequences in Fasta format. Other parameters were used in the default settings in this software version.

[0477] Prosite patterns for conserved domains were generated with the software tool Pratt version 2.1 or manually. Pratt was developed by Inge Jonassen, Dept. of Informatics, University of Bergen, Norway and is described by Jonassen et al. (I. Jonassen, J. F. Collins and D. G. Higgins, Finding flexible patterns in unaligned protein sequences, Protein Science 4 (1995), pp. 1587-1595; I. Jonassen, Effi-cient discovery of conserved patterns using a pattern graph, Submitted to CABIOS Febr. 1997]. The source code (ANSI C) for the stand-alone program is public available, e.g. at establisched Bioinformatic centers like EBI (European Bioinformatics Institute).

[0478] For generating patterns with the software tool Pratt, following settings were used: PL (max Pattern Length): 100, PN (max Nr of Pattern Symbols): 100, PX (max Nr of consecutive x's): 30, FN (max Nr of flexible spacers): 5, FL (max Flexibility): 30, FP (max Flex.Product): 10, ON (max number patterns): 50. Input sequences for Pratt were distinct regions of the protein sequences exhibiting high similarity as identified from software tool MEME. The minimum number of sequences, which have to match the generated patterns (CM, min Nr of Seqs to Match) was set to at least 80% of the provided sequences.

[0479] The pattern identified via PROSITE and/or MEME were further processed with program Fuzzpro, as implemented in the “The European Molecular Biology Open Software Suite” (EMBOSS), version 6.3.1.2 (Trends in Genetics 16 (6), 276 (2000)), to arrive at the motifs 1 to 6 as provided above.

[0480] Using the alignment as described in example 3, highly conserved consensus motifs 1 to 3 were identified.

[0481] In one embodiment a CLP polypeptide comprises a motif with at least 70%, 71%, 72%, 73%, 74%, 75%, 76%, 77%, 78%, 79%, 80%, 81%, 82%, 83%, 84%, 85%, 86%, 87%, 88%, 89%, 90%, 91%, 92%, 93%, 94%, 95%, 96%, 97%, 98%, or 99% sequence identity to any of the six conserved motifs and/or the three consensus motifs contained in SEQ ID NO: 2 as shown by their starting and end positions in FIGS. 1 A and B.

### Example 5

### Topology Prediction of the CLP POI Polypeptide Sequences

[0482] TargetP 1.1 predicts the subcellular location of eukaryotic proteins. The location assignment is based on the predicted presence of any of the N-terminal pre-sequences: chloroplast transit peptide (cTP), mitochondrial targeting peptide (mTP) or secretory pathway signal peptide (SP). Scores on which the final prediction is based are not really probabilities, and they do not necessarily add to one. However, the location with the highest score is the most likely according to TargetP, and the relationship between the scores (the reliability class) may be an indication of how certain the prediction is. The reliability class (RC) ranges from 1 to 5, where 1 indicates the strongest prediction. For the sequences predicted to contain an N-terminal presequence a potential cleavage site can also be predicted. TargetP is maintained at the server of the Technical University of Denmark (see http://www.cbs.dtu.dk/services/TargetP/ & “Locating proteins in the cell using TargetP, SignalP, and related tools”, Olof Emanuelsson, Soren Brunak, Gunnar von Heijne, Henrik Nielsen, Nature Protocols 2, 953-971 (2007)).

[0483] A number of parameters must be selected before analysing a sequence, such as organism group (non-plant or plant), cutoff sets (none, predefined set of cutoffs, or user-specified set of cutoffs), and the calculation of prediction of cleavage sites (yes or no). TargetP settings were: “plant”; cutoff cTP=0; cutoff mTP=0; cutoff SP=0; cutoff other=0. Cleavage site predictions included.

[0484] The results of TargetP 1.1 analysis of the polypeptide sequence as represented by SEQ ID NO: 2 are presented Table C. The “plant” organism group has been selected, no cutoffs defined, and the predicted length of the transit peptide requested. The subcellular localization of the polypeptide sequence as represented by SEQ ID NO: 2 is may most likely be in the cytoplasm and/or the nucleus.

TABLE C
TargetP 1.1 analysis of the polypeptide
sequence as represented by SEQ ID NO: 2

| | |
|---|---|
| Length (AA) | 815 |
| Chloroplastic transit peptide | 0.24 |
| Mitochondrial transit peptide | 0.194 |
| Secretory pathway signal peptide | 0.006 |
| Other subcellular targeting | 0.444 |
| Predicted Location | — |
| Reliability class | 4 |
| Predicted transit peptide length | 0 |

[0485] Many other algorithms can be used to perform such analyses, including:
[0486] ChloroP 1.1 hosted on the server of the Technical University of Denmark;
[0487] Protein Prowler Subcellular Localisation Predictor version 1.2 hosted on the server of the Institute for Molecular Bioscience, University of Queensland, Brisbane, Australia;
[0488] PENCE Proteome Analyst PA-GOSUB 2.5 hosted on the server of the University of Alberta, Edmonton, Alberta, Canada;
[0489] TMHMM, hosted on the server of the Technical University of Denmark
[0490] PSORT (URL: psort.org)
[0491] PLOC (Park and Kanehisa, Bioinformatics, 19, 1656-1663, 2003).

### Example 6

### Cloning of the CLP Encoding Nucleic Acid Sequence

[0492] The nucleic acid sequence was amplified by PCR using as template a custom-made tomato cDNA library.

[0493] The nucleic acid sequence was amplified by PCR using as template a custom-made Arabidopsis thaliana seedlings cDNA library.

[0494] The cDNA library used for cloning was custom made from different tissues (e.g. leaves, roots) of Arabidopsis thaliana Col-0 seedlings grown from seeds obtained in Belgium. PCR was performed using a commercially available proofreading Taq DNA polymerase in standard conditions, using 200 ng of template in a 50 μl PCR mix. The primers used were prm17897 (SEQ ID NO: 73; sense, start codon in bold):

5′ ggggacaagtttgtacaaaaaagcaggcttaaacaatgagagctggaggctgc 3′
and prm 17898 (SEQ ID NO: 74; reverse, complementary):
5′ ggggaccactttgtacaagaaagctgggtgcatacgtgcatgctgttagt 3′,
which include the AttB sites for Gateway recombination. The amplified PCR fragment was purified also using standard methods. The first step of the Gateway procedure, the BP reaction, was then performed, during which the PCR fragment recombined in vivo with the pDONR201 plasmid to produce, according to the Gateway terminology, an “entry clone”, pPOI. Plasmid pDONR201 was purchased from Invitrogen (Life Technologies GmbH, Frankfurter Straβe 129B, 64293 Darmstadt, Germany), as part of the Gateway® technology.

[0495] The entry clone comprising SEQ ID NO: 1 was then used in an LR reaction with a destination vector used for Oryza sativa transformation. This vector contained as functional elements within the T-DNA borders: a plant selectable marker; a screenable marker expression cassette; and a Gateway cassette intended for LR in vivo recombination with the nucleic acid sequence of interest already cloned in the entry clone. A rice GOS2 promoter (SEQ ID NO: 82) for constitutive expression was located upstream of this Gateway cassette.

[0496] After the LR recombination step, the resulting expression vector pGOS2::POI (FIG. 5) was transformed into Agrobacterium strain LBA4044 according to methods well known in the art.

### Example 7

### Plant Transformation

### Rice Transformation

[0497] The Agrobacterium containing the expression vector was used to transform Oryza sativa plants. Mature dry seeds of the rice japonica cultivar Nipponbare were dehusked. Sterilization was carried out by incubating for one minute in 70% ethanol, followed by 30 to 60 minutes, preferably 30 minutes in sodium hypochlorite solution (depending on the grade of contamination), followed by a 3 to 6 times, preferably 4 time wash with sterile distilled water. The sterile seeds were then germinated on a medium containing 2,4-D (callus induction medium). After incubation in light for 6 days scutellum-derived calli is transformed with Agrobacterium as described herein below.

[0498] Agrobacterium strain LBA4404 containing the expression vector was used for co-cultivation. Agrobacterium was inoculated on AB medium with the appropriate antibiotics and cultured for 3 days at 28° C. The bacteria were then collected and suspended in liquid co-cultivation medium to a density (OD600) of about 1. The calli were immersed in the suspension for 1 to 15 minutes. The callus tissues were then blotted dry on a filter paper and transferred to solidified, co-cultivation medium and incubated for 3 days in the dark at 25° C. After washing away the Agrobacterium, the calli were grown on 2,4-D-containing medium for 10 to 14 days (growth time for indica: 3 weeks) under light at 28° C.-32° C. in the presence of a selection agent. During this period, rapidly growing resistant callus developed. After transfer of this material to regeneration media, the embryogenic potential was released and shoots developed in the next four to six weeks. Shoots were excised from the calli and incubated for 2 to 3 weeks on an auxin-containing medium from which they were transferred to soil. Hardened shoots were grown under high humidity and short days in a greenhouse.

[0499] Transformation of rice cultivar indica can also be done in a similar way as give above according to techniques well known to a skilled person.

[0500] 35 to 90 independent T0 rice transformants were generated for one construct. The primary transformants were transferred from a tissue culture chamber to a greenhouse. After a quantitative PCR analysis to verify copy number of the T-DNA insert, only single copy transgenic plants that exhibit tolerance to the selection agent were kept for harvest of T1 seed. Seeds were then harvested three to five months after transplanting. The method yielded single locus transformants at a rate of over 50% (Aldemita and Hodges 1996, Chan et al. 1993, Hiei et al. 1994).

[0501] As an alternative, the rice plants may be generated according to the following method: The Agrobacterium containing the expression vector is used to transform Oryza sativa plants. Mature dry seeds of the rice japonica cultivar Nipponbare are dehusked. Sterilization is carried out by incubating for one minute in 70% ethanol, followed by 30 minutes in 0.2% HgCl2, followed by a 6 times 15 minutes wash with sterile distilled water. The sterile seeds are then germinated on a medium containing 2,4-D (callus induction medium). After incubation in the dark for four weeks, embryogenic, scutellum-derived calli are excised and propagated on the same medium. After two weeks, the calli are multiplied or propagated by subculture on the same medium for another 2 weeks. Embryogenic callus pieces are subcultured on fresh medium 3 days before co-cultivation (to boost cell division activity).

[0502] Agrobacterium strain LBA4404 containing the expression vector is used for co-cultivation. Agrobacterium is inoculated on AB medium with the appropriate antibiotics and cultured for 3 days at 28° C. The bacteria are then collected and suspended in liquid co-cultivation medium to a density (OD600) of about 1. The suspension is then transferred to a Petri dish and the calli immersed in the suspension for 15 minutes. The callus tissues are then blotted dry on a filter paper and transferred to solidified, co-cultivation medium and incubated for 3 days in the dark at 25° C. Co-cultivated calli are grown on 2,4-D-containing medium for 4 weeks in the dark at 28° C. in the presence of a selection agent. During this period, rapidly growing resistant callus islands developed. After transfer of this material to a regeneration medium and incubation in the light, the embryogenic potential is released and shoots developed in the next four to five weeks. Shoots are excised from the calli and incubated for 2 to 3 weeks on an auxin-containing medium from which they are transferred to soil. Hardened shoots are grown under high humidity and short days in a greenhouse.

[0503] Approximately 35 to 90 independent T0 rice transformants are generated for one construct. The primary transformants are transferred from a tissue culture chamber to a greenhouse. After a quantitative PCR analysis to verify copy number of the T-DNA insert, only single copy transgenic plants that exhibit tolerance to the selection agent are kept for harvest of T1 seed. Seeds are then harvested three to five months after transplanting. The method yielded single locus transformants at a rate of over 50% (Aldemita and Hodges 1996, Chan et al. 1993, Hiei et al. 1994).

### Example 8

### Transformation of Other Crops

### Corn Transformation

[0504] Transformation of maize (Zea mays) is performed with a modification of the method described by Ishida et al. (1996) Nature Biotech 14(6): 745-50. Transformation is genotype-dependent in corn and only specific genotypes are amenable to transformation and regeneration. The inbred line A188 (University of Minnesota) or hybrids with A188 as a parent are good sources of donor material for transformation, but other genotypes can be used successfully as well. Ears are harvested from corn plant approximately 11 days after pollination (DAP) when the length of the immature embryo is about 1 to 1.2 mm. Immature embryos are cocultivated with Agrobacterium tumefaciens containing the expression vector, and transgenic plants are recovered through organogenesis. Excised embryos are grown on callus induction medium, then maize regeneration medium, containing the selection agent (for example imidazolinone but various selection markers can be used). The Petri plates are incubated in the light at 25° C. for 2-3 weeks, or until shoots develop. The green shoots are transferred from each embryo to maize rooting medium and incubated at 25° C. for 2-3 weeks, until roots develop. The rooted shoots are transplanted to soil in the greenhouse. T1 seeds are produced from plants that exhibit tolerance to the selection agent and that contain a single copy of the T-DNA insert.

### Wheat Transformation

[0505] Transformation of wheat is performed with the method described by Ishida et al. (1996) Nature Biotech 14(6): 745-50. The cultivar Bobwhite (available from CIMMYT, Mexico) is commonly used in transformation. Immature embryos are co-cultivated with Agrobacterium tumefaciens containing the expression vector, and transgenic plants are recovered through organogenesis. After incubation with Agrobacterium, the embryos are grown in vitro on callus induction medium, then regeneration medium, containing the selection agent (for example imidazolinone but various selection markers can be used). The Petri plates are incubated in the light at 25° C. for 2-3 weeks, or until shoots develop. The green shoots are transferred from each embryo to rooting medium and incubated at 25° C. for 2-3 weeks, until roots develop. The rooted shoots are transplanted to soil in the greenhouse. T1 seeds are produced from plants that exhibit tolerance to the selection agent and that contain a single copy of the T-DNA insert.

### Soybean Transformation

[0506] Soybean is transformed according to a modification of the method described in the Texas A&M U.S. Pat. No. 5,164,310. Several commercial soybean varieties are amenable to transformation by this method. The cultivar Jack (available from the Illinois Seed foundation) is commonly used for transformation. Soybean seeds are sterilised for in vitro sowing. The hypocotyl, the radicle and one cotyledon are excised from seven-day old young seedlings. The epicotyl and the remaining cotyledon are further grown to develop axillary nodes. These axillary nodes are excised and incubated with Agrobacterium tumefaciens containing the expression vector. After the cocultivation treatment, the explants are washed and transferred to selection media. Regenerated shoots are excised and placed on a shoot elongation medium. Shoots no longer than 1 cm are placed on rooting medium until roots develop. The rooted shoots are transplanted to soil in the greenhouse. T1 seeds are produced from plants that exhibit tolerance to the selection agent and that contain a single copy of the T-DNA insert.

### Rapeseed/Canola Transformation

[0507] Cotyledonary petioles and hypocotyls of 5-6 day old young seedling are used as explants for tissue culture and transformed according to Babic et al. (1998, Plant Cell Rep 17: 183-188). The commercial cultivar Westar (Agriculture Canada) is the standard variety used for transformation, but other varieties can also be used. Canola seeds are surface-sterilized for in vitro sowing. The cotyledon petiole explants with the cotyledon attached are excised from the in vitro seedlings, and inoculated with Agrobacterium (containing the expression vector) by dipping the cut end of the petiole explant into the bacterial suspension. The explants are then cultured for 2 days on MSBAP-3 medium containing 3 mg/1 BAP, 3% sucrose, 0.7 Phytagar at 23° C., 16 hr light. After two days of co-cultivation with Agrobacterium, the petiole explants are transferred to MSBAP-3 medium containing 3 mg/l BAP, cefotaxime, carbenicillin, or timentin (300 mg/l) for 7 days, and then cultured on MSBAP-3 medium with cefotaxime, carbenicillin, or timentin and selection agent until shoot regeneration. When the shoots are 5-10 mm in length, they are cut and transferred to shoot elongation medium (MSBAP-0.5, containing 0.5 mg/1 BAP). Shoots of about 2 cm in length are transferred to the rooting medium (MS0) for root induction. The rooted shoots are transplanted to soil in the greenhouse. T1 seeds are produced from plants that exhibit tolerance to the selection agent and that contain a single copy of the T-DNA insert.

### Alfalfa Transformation

[0508] A regenerating clone of alfalfa (Medicago sativa) is transformed using the method of (McKersie et al., 1999 Plant Physiol 119: 839-847). Regeneration and transformation of alfalfa is genotype dependent and therefore a regenerating plant is required. Methods to obtain regenerating plants have been described. For example, these can be selected from the cultivar Rangelander (Agriculture Canada) or any other commercial alfalfa variety as described by Brown DCW and A Atanassov (1985. Plant Cell Tissue Organ Culture 4: 111-112). Alternatively, the RA3 variety (University of Wisconsin) has been selected for use in tissue culture (Walker et al., 1978 Am J Bot 65:654-659). Petiole explants are cocultivated with an overnight culture of Agrobacterium tumefaciens C58C1 pMP90 (McKersie et al., 1999 Plant Physiol 119: 839-847) or LBA4404 containing the expression vector. The explants are cocultivated for 3 d in the dark on SH induction medium containing 288 mg/L Pro, 53 mg/L thioproline, 4.35 g/L K2504, and 100 μm acetosyringinone. The explants are washed in half-strength Murashige-Skoog medium (Murashige and Skoog, 1962) and plated on the same SH induction medium without acetosyringinone but with a suitable selection agent and suitable antibiotic to inhibit Agrobacterium growth. After several weeks, somatic embryos are transferred to BOi2Y development medium containing no growth regulators, no antibiotics, and 50 g/L sucrose. Somatic embryos are subsequently germinated on half-strength Murashige-Skoog medium. Rooted seedlings were transplanted into pots and grown in a greenhouse. T1 seeds are produced from plants that exhibit tolerance to the selection agent and that contain a single copy of the T-DNA insert.

### Cotton Transformation

[0509] Cotton is transformed using Agrobacterium tumefaciens according to the method described in U.S. Pat. No. 5,159,135. Cotton seeds are surface sterilised in 3% sodium hypochlorite solution during 20 minutes and washed in distilled water with 500 μg/ml cefotaxime. The seeds are then transferred to SH-medium with 50 μg/ml benomyl for germination. Hypocotyls of 4 to 6 days old seedlings are removed, cut into 0.5 cm pieces and are placed on 0.8% agar. An Agrobacterium suspension (approx. 108 cells per ml, diluted from an overnight culture transformed with the gene of interest and suitable selection markers) is used for inoculation of the hypocotyl explants. After 3 days at room temperature and lighting, the tissues are transferred to a solid medium (1.6 g/l Gelrite) with Murashige and Skoog salts with B5 vitamins (Gamborg et al., Exp. Cell Res. 50:151-158 (1968)), 0.1 mg/l 2,4-D, 0.1 mg/l 6-furfurylaminopurine and 750 μg/ml MgCL2, and with 50 to 100 μg/ml cefotaxime and 400-500 μg/ml carbenicillin to kill residual bacteria. Individual cell lines are isolated after two to three months (with subcultures every four to six weeks) and are further cultivated on selective medium for tissue amplification (30° C., 16 hr photoperiod). Transformed tissues are subsequently further cultivated on non-selective medium during 2 to 3 months to give rise to somatic embryos. Healthy looking embryos of at least 4 mm length are transferred to tubes with SH medium in fine vermiculite, supplemented with 0.1 mg/l indole acetic acid, 6 furfurylaminopurine and gibberellic acid. The embryos are cultivated at 30° C. with a photoperiod of 16 hrs, and plantlets at the 2 to 3 leaf stage are transferred to pots with vermiculite and nutrients. The plants are hardened and subsequently moved to the greenhouse for further cultivation.

[0510] Sugarbeet Transformation

[0511] Seeds of sugarbeet (Beta vulgaris L.) are sterilized in 70% ethanol for one minute followed by 20 min. shaking in 20% Hypochlorite bleach e.g. Clorox® regular bleach (commercially available from Clorox, 1221 Broadway, Oakland, Calif. 94612, USA). Seeds are rinsed with sterile water and air dried followed by plating onto germinating medium (Murashige and Skoog (MS) based medium (Murashige, T., and Skoog., 1962. Physiol. Plant, vol. 15, 473-497) including B5 vitamins (Gamborg et al.; Exp. Cell Res., vol. 50, 151-8.) supplemented with 10 g/l sucrose and 0.8% agar). Hypocotyl tissue is used essentially for the initiation of shoot cultures according to Hussey and Hepher (Hussey, G., and Hepher, A., 1978. Annals of Botany, 42, 477-9) and are maintained on MS based medium supplemented with 30 g/l sucrose plus 0.25 mg/l benzylamino purine and 0.75% agar, pH 5.8 at 23-25° C. with a 16-hour photoperiod. Agrobacterium tumefaciens strain carrying a binary plasmid harbouring a selectable marker gene, for example nptII, is used in transformation experiments. One day before transformation, a liquid LB culture including antibiotics is grown on a shaker (28° C., 150 rpm) until an optical density (O.D.) at 600 nm of ˜1 is reached. Overnight-grown bacterial cultures are centrifuged and resuspended in inoculation medium (O.D. ˜1) including Acetosyringone, pH 5.5. Shoot base tissue is cut into slices (1.0 cm×1.0 cm×2.0 mm approximately). Tissue is immersed for 30 s in liquid bacterial inoculation medium. Excess liquid is removed by filter paper blotting. Co-cultivation occurred for 24-72 hours on MS based medium incl. 30 g/l sucrose followed by a non-selective period including MS based medium, 30 g/l sucrose with 1 mg/l BAP to induce shoot development and cefotaxim for eliminating the Agrobacterium. After 3-10 days explants are transferred to similar selective medium harbouring for example kanamycin or G418 (50-100 mg/l genotype dependent). Tissues are transferred to fresh medium every 2-3 weeks to maintain selection pressure. The very rapid initiation of shoots (after 3-4 days) indicates regeneration of existing meristems rather than organogenesis of newly developed transgenic meristems. Small shoots are transferred after several rounds of subculture to root induction medium containing 5 mg/l NAA and kanamycin or G418. Additional steps are taken to reduce the potential of generating transformed plants that are chimeric (partially transgenic). Tissue samples from regenerated shoots are used for DNA analysis. Other transformation methods for sugarbeet are known in the art, for example those by Linsey & Gallois (Linsey, K., and Gallois, P., 1990. Journal of Experimental Botany; vol. 41, No. 226; 529-36) or the methods published in the international application published as WO9623891A.

### Sugarcane Transformation

[0512] Spindles are isolated from 6-month-old field grown sugarcane plants (Arencibia et al., 1998. Transgenic Research, vol. 7, 213-22; Enriquez-Obregon et al., 1998. Planta, vol. 206, 20-27). Material is sterilized by immersion in a 20% Hypochlorite bleach e.g. Clorox® regular bleach (commercially available from Clorox, 1221 Broadway, Oakland, Calif. 94612, USA) for 20 minutes. Transverse sections around 0.5 cm are placed on the medium in the top-up direction. Plant material is cultivated for 4 weeks on MS (Murashige, T., and Skoog., 1962. Physiol. Plant, vol. 15, 473-497) based medium incl. B5 vitamins (Gamborg, O., et al., 1968. Exp. Cell Res., vol. 50, 151-8) supplemented with 20 g/l sucrose, 500 mg/l casein hydrolysate, 0.8% agar and 5 mg/l 2,4-D at 23° C. in the dark. Cultures are transferred after 4 weeks onto identical fresh medium. Agrobacterium tumefaciens strain carrying a binary plasmid harbouring a selectable marker gene, for example hpt, is used in transformation experiments. One day before transformation, a liquid LB culture including antibiotics is grown on a shaker (28° C., 150 rpm) until an optical density (O.D.) at 600 nm of ˜0.6 is reached. Overnight-grown bacterial cultures are centrifuged and resuspended in MS based inoculation medium (O.D. ˜0.4) including acetosyringone, pH 5.5. Sugarcane embryogenic callus pieces (2-4 mm) are isolated based on morphological characteristics as compact structure and yellow colour and dried for 20 min. in the flow hood followed by immersion in a liquid bacterial inoculation medium for 10-20 minutes. Excess liquid is removed by filter paper blotting. Co-cultivation occurred for 3-5 days in the dark on filter paper which is placed on top of MS based medium incl. B5 vitamins containing 1 mg/l 2,4-D. After co-cultivation calli are washed with sterile water followed by a non-selective cultivation period on similar medium containing 500 mg/l cefotaxime for eliminating remaining Agrobacterium cells. After 3-10 days explants are transferred to MS based selective medium incl. B5 vitamins containing 1 mg/l 2,4-D for another 3 weeks harbouring 25 mg/l of hygromycin (genotype dependent). All treatments are made at 23° C. under dark conditions. Resistant calli are further cultivated on medium lacking 2,4-D including 1 mg/l BA and 25 mg/l hygromycin under 16 h light photoperiod resulting in the development of shoot structures. Shoots are isolated and cultivated on selective rooting medium (MS based including, 20 g/l sucrose, 20 mg/l hygromycin and 500 mg/l cefotaxime). Tissue samples from regenerated shoots are used for DNA analysis. Other transformation methods for sugarcane are known in the art, for example from the international application published as WO2010/151634A and the granted European patent EP1831378.

[0513] For transformation by particle bombardment the induction of callus and the transformation of sugarcane can be carried out by the method of Snyman et al. (Snyman et al., 1996, S. Afr. J. Bot 62, 151-154). The construct can be cotransformed with the vector pEmuKN, which expressed the npt[pi] gene (Beck et al. Gene 19, 1982, 327-336; Gen-Bank Accession No. V00618) under the control of the pEmu promoter (Last et al. (1991) Theor. Appl. Genet. 81, 581-588). Plants are regenerated by the method of Snyman et al. 2001 (Acta Horticulturae 560, (2001), 105-108).

### Example 9

### Phenotypic Evaluation Procedure

### 9.1 Evaluation Setup

[0514] 35 to 90 independent T0 rice transformants were generated. The primary transformants were transferred from a tissue culture chamber to a greenhouse for growing and harvest of T1 seed. Six events, of which the T1 progeny segregated 3:1 for presence/absence of the transgene, were retained. For each of these events, approximately 10 T1 seedlings containing the transgene (hetero- and homo-zygotes) and approximately 10 T1 seedlings lacking the transgene (nullizygotes) were selected by monitoring visual marker expression. The transgenic plants and the corresponding nullizygotes were grown side-by-side at random positions. Greenhouse conditions were of shorts days (12 hours light), 28° C. in the light and 22° C. in the dark, and a relative humidity of 70%. Plants grown under non-stress conditions were watered at regular intervals to ensure that water and nutrients were not limiting and to satisfy plant needs to complete growth and development, unless they were used in a stress screen.

[0515] From the stage of sowing until the stage of maturity the plants were passed several times through a digital imaging cabinet. At each time point digital images (2048×1536 pixels, 16 million colours) were taken of each plant from at least 6 different angles.

[0516] T1 events can be further evaluated in the T2 generation following the same evaluation procedure as for the T1 generation, e.g. with less events and/or with more individuals per event.

### Drought Screen

[0517] T1 or T2 plants were grown in potting soil under normal conditions until they approached the heading stage. They were then transferred to a “dry” section where irrigation is withheld. Soil moisture probes were inserted in randomly chosen pots to monitor the soil water content (SWC). When SWC went below certain thresholds, the plants were automatically re-watered continuously until a normal level is reached again. The plants were then re-transferred again to normal conditions. The rest of the cultivation (plant maturation, seed harvest) was the same as for plants not grown under abiotic stress conditions. Growth and yield parameters were recorded as detailed for growth under normal conditions.

### Nitrogen Use Efficiency Screen

[0518] T1 or T2 plants are grown in potting soil under normal conditions except for the nutrient solution. The pots are watered from transplantation to maturation with a specific nutrient solution containing reduced N nitrogen (N) content, usually between 7 to 8 times less. The rest of the cultivation (plant maturation, seed harvest) is the same as for plants not grown under abiotic stress. Growth and yield parameters are recorded as detailed for growth under normal conditions.

[0519] Salt Stress Screen

[0520] T1 or T2 plants are grown on a substrate made of coco fibers and particles of baked clay (Argex) (3 to 1 ratio). A normal nutrient solution is used during the first two weeks after transplanting the plantlets in the greenhouse. After the first two weeks, 25 mM of salt (NaCl) is added to the nutrient solution, until the plants are harvested. Growth and yield parameters are recorded as detailed for growth under normal conditions.

### 9.2 Statistical Analysis: F Test

[0521] A two factor ANOVA (analysis of variants) was used as a statistical model for the overall evaluation of plant phenotypic characteristics. An F test was carried out on all the parameters measured of all the plants of all the events transformed with the gene of the present invention. The F test was carried out to check for an effect of the gene over all the transformation events and to verify for an overall effect of the gene, also known as a global gene effect. The threshold for significance for a true global gene effect was set at a 5% probability level for the F test. A significant F test value points to a gene effect, meaning that it is not only the mere presence or position of the gene that is causing the differences in phenotype.

### 9.3 Parameters Measured

[0522] From the stage of sowing until the stage of maturity the plants were passed several times through a digital imaging cabinet. At each time point digital images (2048×1536 pixels, 16 million colours) were taken of each plant from at least 6 different angles as described in WO2010/031780. These measurements were used to determine different parameters.

### Biomass-Related Parameter Measurement

[0523] The biomass of aboveground plant parts was determined by measuring plant aboveground area (or leafy biomassgreen biomass), which was determined by counting the total number of pixels on the digital images from aboveground plant parts discriminated from the background (“AreaMax”). This value was averaged for the pictures taken on the same time point from the different angles and was converted to a physical surface value expressed in square mm by calibration. Experiments show that the aboveground plant area measured this way correlates with the biomass of plant parts above ground. The above ground area is the area measured at the time point at which the plant had reached its maximal leafy green biomass.

[0524] Increase in root biomass is expressed as an increase in total root biomass (measured as maximum biomass of roots observed during the lifespan of a plant, “RootMax”); or as an increase in the root/shoot index (“RootShInd”), measured as the ratio between root mass and shoot mass in the period of active growth of root and shoot. In other words, the root/shoot index is defined as the ratio of the rapidity of root growth to the rapidity of shoot growth in the period of active growth of root and shoot. This parameter is an indication or root biomass and development.

[0525] Also, the diameter of the roots, the amount of roots above a certain thickness level and below a certain thinness level can be measured. Root biomass can be determined using a method as described in WO 2006/029987.

[0526] The absolute height can be measured (“HeightMax”). An alternative A robust indication of the height of the plant is the measurement of the location of the centre of gravity, i.e. determining the height (in mm) of the gravity centre of the leafy above-ground, green biomass. This avoids influence by a single erect leaf, based on the asymptote of curve fitting or, if the fit is not satisfactory, based on the absolute maximum (“GravityYMax”).

[0527] The greenness before flowering (GNbfFlow) can be measured from digital images as well. It is an indication of the greenness of a plant before flowering. Proportion (expressed as %) of green and dark green pixels in the last imaging before flowering. It is both a development time related parameter and a biomass related parameter.

### Parameters Related to Development Time

[0528] The early vigour is the plant aboveground area three weeks post-germination. Early vigour was determined by counting the total number of pixels from aboveground plant parts discriminated from the background. This value was averaged for the pictures taken on the same time point from different angles and was converted to a physical surface value expressed in square mm by calibration.

[0529] Increase in root biomass is expressed as an increase in total root biomass (measured as maximum biomass of roots observed during the lifespan of a plant). Also, the diameter of the root, the amount of roots above a certain thickness level and below a certain thinness level can be measured. Root biomass can be determined using a method as described in WO 2006/029987. The amounts of thick and/or thin roots above or below a threshold can be measured as well.

[0530] AreaEmer is an indication of quick early development when this value is decreased compared to control plants. It is the ratio (expressed in %) between the time a plant needs to make 30% of the final biomass and the time needs to make 90% of its final biomass.

[0531] The “time to flower” or “flowering time” of the plant can be determined using the method as described in WO 2007/093444.

[0532] Early seedling vigour is the seedling aboveground area . . . week post-germination (plantlets of about 4 cm high).

[0533] “EmerVigor” is an indication of early plant growth. It is the above-ground biomass of the plant one week after re-potting the established seedlings from their germination trays into their final pots. It is the area (in mm²) covered by leafy biomass in the imaging. It was determined by counting the total number of pixels from aboveground plant parts discriminated from the background. This value was averaged for the pictures taken on the same time point from different angles and was converted to a physical surface value expressed in square mm by calibration.

[0534] The relative growth rate (RGR) as the the natural logarithm of the above ground biomass measured (called ‘TotalArea’) at a second time point, minus the natural logarithm of the above ground biomass at a first time point, divided by the number of days between those two time points ([log(TotalArea2)−log(TotalArea1)]/ndays). The time points are the same for all plants in one experiment. The first time point is chosen as the earliest measurement taken between 25 and 41 days after planting. If the number of measurements (plants) at that time point in that experiment is less than one third of the maximum number of measurements taken per time point for that experiment, then the next time point is taken (again with the same restriction on the number of measurements). The second time point is simply the next time point (with the same restriction on the number of measurements).

### Measuring the Greenness of Plants

[0535] The greenness index is calculated as one minus the number of pixels that are light green (bins 2-21 in the spectrum) divided by the total number of pixels, multiplied by 100 (100*[1−(nLGpixels/npixels)]).

### Early Greenness:

[0536] The greenness index at the time point before the flowering time point, when the maximum mean greenness for null plants is reached for that experiment. The flowering time point is defined as the time point where more than 3 plants with panicles are detected.

[0537] Time points are the same for all plants in an experiment. If the number of valid observations on that time point is 30 or less, the time point with the second highest mean greenness for null plants, before flowering, is chosen. The first time point is never chosen as flowering time point.

### Late Greenness:

[0538] The greenness index at the time point after or at the flowering time point, when the minimum mean greenness for null plants is reached for that experiment. The flowering time point is defined as the time point where more than 3 plants with panicles are detected. Time points are the same for all plants in an experiment. If the number of valid observations on that time point is 30 or less, the time point with the second lowest mean greenness for null plants, after or at flowering, is chosen.

Greenness after Drought

[0539] The greenness of a plant after drought stress can be measured as the proportion (expressed as %) of green and dark green pixels in the first imaging after the drought treatment.

[0540] In addition, the growth of the plants under drought conditions can be measured.

### Seed-Related Parameter Measurements

[0541] The mature primary panicles were harvested, counted, bagged, barcode-labelled and then dried for three days in an oven at 37° C. The panicles were then threshed and all the seeds were collected and counted. The seeds are usually covered by a dry outer covering, the husk. The filled husks (herein also named filled florets) were separated from the empty ones using an air-blowing device. The empty husks were discarded and the remaining fraction was counted again. The filled husks were weighed on an analytical balance.

[0542] The total number of seeds was determined by counting the number of filled husks that remained after the separation step. The total seed weight (“totalwgseeds”, “TWS”) was measured by weighing all filled husks harvested from a plant.

[0543] The total number of seeds (or florets; “nrtotalseed”) per plant was determined by counting the number of husks (whether filled or not) harvested from a plant.

[0544] Thousand Kernel Weight (“TKW”) is extrapolated from the number of seeds counted and their total weight.

[0545] The Harvest Index (“harvestindex”, “HI”) in the present invention is defined as the ratio between the total seed weight and the above ground area (mm²), multiplied by a factor 106. The number of flowers per panicle (“flowersperpanicle”; “fpp”) as defined in the present invention is the ratio between the total number of seeds over the number of mature primary panicles.

[0546] The “seed fill rate” or “seed filling rate” (“nrfilledseed”) as defined in the present invention is the proportion (expressed as a %) of the number of filled seeds (i.e. florets containing seeds) over the total number of seeds (i.e. total number of florets). In other words, the seed filling rate is the percentage of florets that are filled with seed.

[0547] Also, the number of panicles in the first flush (“firstpan”) was measured.

### Example 10

### Results of the Phenotypic Evaluation of the Transgenic Plants

[0548] The results of the evaluation of transgenic rice plants in the T1 generation and expressing a nucleic acid encoding the CLP polypeptide of SEQ ID NO: 2 under non-stress conditions are presented below in Table D1. When grown under non-stress conditions, an increase of at least 5% was observed for the height of the centre of gravity (GravityYMax) in at least 3 of the 6 events, and for the seed yield parameters total number of seed (nrtotalseed), number of filled seed (nrfilledseed), the fillrate, the total weight of seeds (totalwgseeds) and the harvest index (harvestindex). Also, the number of panicles in the first flush and the flowers per panicle, a calculated parameter (the number of florets of a plant/number of panicles in the first flush) estimating the average number of florets per panicle on a plant were higher in at least one event than in the control plants. In addition the thousand kernel weight was increased in at least two events, just as the fillrate and the number of filled seed. Interestingly, the seed yield parameters TKW and fillrate or the number of filled seed show increases sometimes in different events indicating that increases in seed yield are common but the events may differ in individual parameters. An event may show increased TKW, but not the highest fillrate, while the event with the highest fillrate may not show an increase in TKW. Yet a third event may show both increased TKW and increased fillrate.

[0549] Also increased were the aboveground biomass (AreaMax) and the maximum height of the plants in at least one event. The aboveground biomass was increased in at least 2 out of the 6 events significantly and up to an increase of 9% in two events.

[0550] One event showed a generally reduced root growth and had decreased root biomass, less thick roots and less thin roots. The other events were neutral or had even increased thick roots in 2 events. The event with the reduced root growth also was less green at an early stage, which was shared by two other events. The greenness was reduced also at a later stage in the latter two events and a third one. The other events showed normal greenness.

TABLE D1
Data summary for transgenic rice plants under normal growth conditions;
for each parameter, the overall percent increase is shown for T1
generation plants, for each parameter the p-value is <0.05.

| Parameter | Overall |
|---|---|
| totalwgseeds | 16.0 |
| nrtotalseed | 6.7 |
| fillrate | 8.9 |
| harvestindex | 11.7 |
| nrfilledseed | 14.5 |
| GravityYMax | 5.2 |

[0551] The results of the evaluation of transgenic rice plants in the T1 generation and expressing a nucleic acid encoding the CLP polypeptide of SEQ ID NO: 2 under drought conditions are presented below in Table D2.

[0552] When grown under drought conditions, taking all transgenic plants of all events together an increase of at least 5% was observed for the seed yield parameters number of filled seed (nrfilledseed), the fillrate, the total weight of seeds (totalwgseeds) and the harvest index (harvestindex). All these were increased overall above 20%. Further seed yield parameters like the number of total seed, TKW and the number of panicles in the first flush were increased, although one event showed a reduced number of panicles in the first flush with 2 showing an increase or tendency to increase. One event showed a reduced number of total seed yet increases in other seed parameters. A different event showed increased seed numbers.

[0553] Also increased overall was the growth of the plants under drought conditions. The aboveground biomass was increased in two events, and decreased to a lesser extent in the plants of another event. Emergence vigour (EmerVigor) was increased in one event, with an additional event showing a lesser increase and another one showing a delay. The greenness was increased in the plants of one event that had shown reduced greenness at an early stage. Of the other events, one showed also a reduced early greenness and another one an increased early greenness. Both these events were normal in their late greenness, but the event with reduced early greenness resulted in an increase in relative growth rate (RGR). The other event that had reduced early greenness but a strongly increased late greenness showed a reduced overall relative growth rate and reduced early height. Another event showed improved early height, normal greenness at an early and late stage, reduced thin roots and root-to-shoot-index (with the other events being uneventful in these two parameters), a tendency to more seed by number and to increased above-ground biomass and a strong resistance to wilting under drought (measured as the reduction in area (in mm²) covered by above-ground biomass between an imaging just before drought stress and an image after drought stress and before recovery).

[0554] The aboveground biomass was increased in 1 out of the 6 events significantly and as mentioned above another had a tendency to increase above-ground biomass. Further at least two events showed an increase in root biomass (RootMax). Interestingly, the plants of the one event that had generally reduced root growth under non-stress conditions recovered under drought and their root biomass, thick roots and thin roots were normal.

[0555] Also, the emergence vigour was increase in at least one event, as was the greenness after drought. The centre of gravity of at least one event was increased simultaneously with an increase in root thickness (RootThickMax).

TABLE D2
Data summary for transgenic rice plants under drought growth conditions;
for each parameter, the overall percent increase is shown for T1
generation plants, for each parameter the p-value is <0.05.

| Parameter | Overall |
|---|---|
| totalwgseeds | 27.0 |
| fillrate | 21.6 |
| harvestindex | 21.0 |
| nrfilledseed | 23.4 |

### Example 11

### Functional Assay for the CLP Polypeptide

[0556] Suitable assay to test ATP-dependent protease, as well as materials and methods for doing such experiments are well known in the art.

1-37. (canceled)

38. A method for enhancing one or more yield-related traits in a plant relative to a control plant, comprising increasing expression in a plant of a nucleic acid encoding a CLP polypeptide and growing the plant, wherein said CLP polypeptide comprises the Interpro motifs IPR004176 (Clp, N-terminal) and/or IPR023150 (Double Clp-N motif), preferably both, and wherein said CLP polypeptide is selected from the group consisting of:
(i) a polypeptide comprising any of the amino acid sequences listed in Table A, preferably SEQ ID NO: 2, 87, 89, 91, 93, 95, 97, 99, 101, 103 or 105, more preferably SEQ ID NO: 2; and
(ii) a polypeptide having at least 35%, 40%, 45%, 50%, 51%, 52%, 53%, 54%, 55%, 56%, 57%, 58%, 59%, 60%, 61%, 62%, 63%, 64%, 65%, 66%, 67%, 68%, 69%, 70%, 71%, 72%, 73%, 74%, 75%, 76%, 77%, 78%, 79%, 80%, 81%, 82%, 83%, 84%, 85%, 86%, 87%, 88%, 89%, 90%, 91%, 92%, 93%, 94%, 95%, 96%, 97%, 98%, or 99% sequence identity to any of the amino acid sequences listed in Table A, preferably SEQ ID NO: 2, 87, 89, 91, 93, 95, 97, 99, 101, 103 or 105, more preferably SEQ ID NO: 2, over the entire length of the sequence, wherein said polypeptide preferably confers one or more enhanced yield-related traits in a plant relative to a control plant.

39. The method of claim 38, wherein said CLP polypeptide:
(i) comprises a PFAM domain PF02861 as a split domain, wherein the N-terminal part of the PFAM domain PF02861 finds a match at or near the N-terminus of the CLP polypeptide and the C-terminal part of the PFAM domain PF02861 finds a match C-terminally of this, wherein both matching amino acid stretches are located in the N-terminal half of the CLP polypeptide, preferably in the N-terminal quarter of the CLP polypeptide;
(ii) has a polypeptide chain following the PFAM domain PF02861 towards and including the C-terminus that is selected from the group consisting of:
(a) an acidic polypeptide chain with an isoelectric point value (pI) of below 7.0;
(b) a polypeptide chain with a content of Serine and/or Threonine of equal to or above 10% by number;
(c) a polypeptide chain that comprises or contains at least 30% by number of amino acids with aliphatic or aliphatic hydroxyl side chain; and
(d) any combination of (a) to (c);
(iii) does not comprise a PFAM domain PF00004 (abbreviated as AAA and/or does not comprise the PFAM domain PF07724 (abbreviated as AAA_{—}2), preferably when analysed with the InterProScan software (InterProScan v4.8 & the InterPro database release 41.0, 13 Feb. 2013);
(iv) is suitable to form a protein complex of protease activity of EC 3.4.21.92 with endogenous polypeptides when expressed in a plant host cell;
or
(v) is not the amino acid sequence of SEQ ID NO: 425, 426 or 427 disclosed in the patent application publication US 2009/100536.

40. The method of claim 38, wherein said CLP polypeptide comprises:
(i) all of the following motifs:
Motif 1 (SEQ ID NO: 76):
A-[AGLV]-K-x(0,2)-I-x(1,3)-Q-L-[IMV]-[IV]-S-I-L-
[DH]-D-P-S-V-S-R-V-M-R-[DE]-A-[DG]-F-[NS]-S-[PST]-
x-[LV]-[KR]-[ANST]-x-[IV]-E-x-[AE];
Motif 2 (SEQ ID NO: 77):
F-x-E-x-[NST]-[ADEST]-E-N-L-x(2)-L-[CS]-x-A-L-
x(2)-[EKR]-x-[PST];
Motif 3 (SEQ ID NO: 78):
T-W-[FLM]-[FL]-F-x-G-x-[DGN]-x(2)-[ADG]-[KR]-x(2)-
[IMV]-[ACS]-x-E-L-A-x-[LV]-V-F-G-S-x(3)-[FV]-x-
[ACST]-x(3)-[ADGS]-[ADEGNST];
Motif 4 (SEQ ID NO: 79):
G-x(1,2)-V-x(0,1)-L-x-[LV]-[EG]-D-L-x-[WY]-x(2)-
[DE]-x(2)-[AST];
Motif 5 (SEQ ID NO: 80):
E-x(0,4)-L-x-[PT]-[FILV]-[ATV]-[IV]-P-[ADV]-[GST]
and
Motif 6 (SEQ ID NO: 81):
L-x-D-[AST]-I-[IV]-[IV]-x-[CGNS]-x-[AEQ];
(ii) the motifs according to (i) and in addition the consensus sequence of SEQ ID NO: 75;
(iii) the motifs according to (i) or (ii) and further comprising all of the following consensus motifs:
Consensus motif 1 (SEQ ID NO: 83):
HPLQC[KR]ALELCF[NS]VA;
Consensus motif 2 (SEQ ID NO: 84):
NAL[GV]AA[LF]KRAQAHQR;
and
Consensus motif 3 (SEQ ID NO: 85)
LDDPSVSRVMREA[GS]F;
(iv) any 5 of the motifs listed under (i) and all three consensus motifs listed under (iii);
(v) any 4 of the motifs listed under (i) and all three consensus motifs listed under (iii);
(vi) any 4 of the motifs listed under (i) and any one of the consensus motifs listed under (iii);
(vii) any 3 of the motifs listed under (i);
or
(viii) one of the motifs as described herein above,
wherein −x represents in any motif position the presence of an amino acid residue of any type as often as the lowest integer number or the highest integer number in brackets following the −x indicate, or any of the integer numbers in between the lowest and the highest number, wherein the lowest integer number and the highest integer number might be identical and hence only one integer number is found within the brackets following −x, and wherein −x(1) is shortened to −x and any amino acid residue inserted at the position of −x does not need to be of the same type as the preceding one or another one inserted.

41. The method of claim 38, wherein said nucleic acid is selected from the group consisting of:
(i) a nucleic acid comprising the nucleotide sequence of SEQ ID NO: 1, 3, 5, 7, 9, 11, 13, 15, 17, 19, 21, 23, 25, 27, 29, 31, 33, 35, 37, 39, 41, 43, 45, 47, 49, 51, 53, 55, 57, 59, 61, 63, 65, 67, 69 or 71, preferably SEQ ID NO: 1;
(ii) the complement of a nucleic acid comprising the nucleotide sequence of SEQ ID NO: 1, 3, 5, 7, 9, 11, 13, 15, 17, 19, 21, 23, 25, 27, 29, 31, 33, 35, 37, 39, 41, 43, 45, 47, 49, 51, 53, 55, 57, 59, 61, 63, 65, 67, 69 or 71, preferably SEQ ID NO: 1;
(iii) a nucleic acid encoding a polypeptide having at least 25%, 30%, 35%, 40%, 45%, 50%, 51%, 52%, 53%, 54%, 55%, 56%, 57%, 58%, 59%, 60%, 61%, 62%, 63%, 64%, 65%, 66%, 67%, 68%, 69%, 70%, 71%, 72%, 73%, 74%, 75%, 76%, 77%, 78%, 79%, 80%, 81%, 82%, 83%, 84%, 85%, 86%, 87%, 88%, 89%, 90%, 91%, 92%, 93%, 94%, 95%, 96%, 97%, 98%, or 99% sequence identity to the entire amino acid sequence of any of the amino acid sequences listed in Table A, preferably SEQ ID NO: 2, 87, 89, 91, 93, 95, 97, 99, 101, 103 or 105, more preferably SEQ ID NO: 2, and further preferably conferring one or more enhanced yield-related traits in a plant relative to a control plant; and
(iv) a nucleic acid which hybridizes with any of the nucleic acids of (i) to (iii) under high stringency hybridization conditions and preferably confers one or more enhanced yield-related traits in a plant relative to a control plant.

42. The method of claim 38, wherein:
(i) the expression of the nucleic acid is increased by one or more recombinant method(s); or
(ii) the expression of the nucleic acid is increased by introducing and expressing in the plant said nucleic acid.

43. The method of claim 38, wherein said one or more enhanced yield-related traits comprise increased yield relative to a control plant, preferably increased biomass and/or increased seed yield relative to a control plant, and more preferably increased aboveground biomass, increased below-ground biomass, increased seed yield and/or increased sugar yield relative to a control plant.

44. The method of claim 38, wherein said one or more enhanced yield-related traits are obtained under non-stress conditions.

45. The method of claim 38, wherein said one or more enhanced yield-related traits are obtained under conditions of environmental stress, preferably under conditions of temperature stress, salt stress, nitrogen deficiency and/or drought.

46. The method of claim 38, wherein said nucleic acid:
(i) is of plant origin, from a dicotyledonous plant, from a plant of the family Brassicaceae, or from an Arabidopsis species;
(ii) encodes any one of the polypeptides listed in Table A or is a portion of such a nucleic acid;
(iii) hybridizes with the complement of any of the nucleic acids listed in Table A; or
(iv) encodes an orthologue or paralogue of any of the polypeptides given in Table A.

47. The method of claim 38, wherein said nucleic acid is operably linked to a constitutive promoter of plant origin, a medium strength constitutive promoter of plant origin, a GOS2 promoter, or a GOS2 promoter from rice.

48. An isolated nucleic acid selected from the group consisting of:
(i) a nucleic acid comprising the nucleotide sequence of SEQ ID NO: 86, 88, 90, 92, 94, 96, 98, 100, 102 or 104; and
(ii) a nucleic acid encoding a polypeptide comprising the amino acid sequence of SEQ ID NO: 87, 89, 91, 93, 95, 97, 99, 101, 103 or 105.

49. An isolated polypeptide encoded by the isolated nucleic acid of claim 48.

50. An expression construct comprising:
(i) a nucleic acid sequence encoding the CLP polypeptide as defined in claim 38;
(ii) one or more control sequences capable of driving expression of the nucleic acid sequence of (i); and optionally
(iii) a transcription termination sequence.

51. The expression construct of claim 50, wherein one of said control sequences is a constitutive promoter, a medium strength constitutive promoter, a plant promoter, a GOS2 promoter, or a GOS2 promoter from rice.

52. A plant, plant part or plant cell, or a transgenic pollen grain, comprising the expression construct of claim 50.

53. A host cell, preferably a bacterial host cell, more preferably an Agrobacterium species host cell, comprising the expression construct of claim 50.

54. A method for making a plant having one or more enhanced yield-related traits, preferably increased yield, and more preferably increased seed yield and/or increased biomass, relative to a control plant, comprising transforming the expression construct of claim 50 into a plant, plant cell or plant part.

55. A method for the production of a transgenic plant having one or more enhanced yield-related traits, preferably increased yield, and more preferably increased seed yield and/or increased biomass, relative to a control plant, comprising:
(i) introducing and expressing in a plant or plant cell a nucleic acid encoding the CLP polypeptide as defined in claim 38;
(ii) cultivating said plant or plant cell under conditions promoting plant growth and development.

56. A plant or plant cell obtained by the method of claim 55, or a plant part, seed, or progeny of said plant, wherein said plant or plant cell, or said plant part, seed, or progeny, comprises a recombinant nucleic acid encoding said CLP polypeptide.

57. A transgenic plant having one or more enhanced yield-related traits, preferably increased yield, and more preferably increased seed yield and/or increased biomass, relative to a control plant, resulting from increased expression of a nucleic acid encoding the CLP polypeptide as defined in claim 38.

58. The transgenic plant of claim 57, wherein said plant is a crop plant, a monocotyledonous plant, or a cereal, or wherein said plant is beet, sugar beet, alfalfa, sugarcane, rice, maize, wheat, barley, millet, rye, triticale, sorghum, emmer, spelt, einkorn, teff, milo, or oats.

59. An harvestable part of the transgenic plant of claim 57, wherein said harvestable part comprises a recombinant nucleic acid encoding said CLP polypeptide.

60. The harvestable part of claim 59, wherein said harvestable part is:
(i) shoot biomass,
(ii) root biomass, preferably taproot or tuber biomass; and/or
(iii) seed.

61. A product derived from the transgenic plant of claim 57 or an harvestable part of said plant, wherein said product comprises a recombinant nucleic acid encoding said CLP polypeptide.

62. A method for the production of a product, comprising growing the transgenic plant of claim 57 and producing a product from or by:
(i) said plant; or
(ii) parts, including seeds, of said plant.

63. A recombinant chromosomal DNA comprising the expression construct of claim 50.

64. A composition comprising:
(i) the expression construct of claim 50;
(ii) a host cell, preferably a plant cell, comprising the expression construct of (i); or
(iii) a recombinant chromosomal DNA comprising the expression construct of (i).

The application's sequence listing, which the Patent Office published only in electronic form, follows.

SEQUENCE LISTING (105 sequences)

SEQ ID NO: 1 - DNA, 2448 bp, Arabidopsis thaliana
  source 1..2448: /organism="Arabidopsis thaliana" /mol_type="unassigned DNA"
  CDS 1..2448
  variation 2077..2079: /note="ttg is replaced by cta"
atgagagctggaggctgcacggtggagcaagccctcacggcggatgctgcaaacgtggtgaaacaagccatggggttggctagacggagaggacatgctcaggtcacacctctccatgtagctagcaccatgctctctgctcccacgggtttacttagaacagcttgtctccaatctcacactcaccctcttcaatgcagagccctcgagctctgcttcaacgtagctttgaaccgcctcccgacctctacagggagtcctatgttaggggttccaacttcccctttcccttctatctccaacgctctcggtgcagctttcaaacgcgcacaagctcaccaacgacgtggttctatagagagccagcaacaaccgatcttagcagtcaagatcgaagtggagcagctcataatatctatcctcgatgatcctagcgtgagtagagtgatgagagaagctggtttctcgagtcctcaagtgaagactaaagtcgagcaagctgtttctttagagatttgctctaaaacaacctcttcgagtaaacccaaagaggggaagttattaactcctgtcaggaacgaggatgttatgaacgttatcaacaatcttgtcgacaaaaagagaagaaatttcgtgatcgtaggagagtgtttagccactattgacggagttgtgaagacggtgatggaaaaagtcgacaaaaaagacgtgcccgaggttttaaaagacgtaaagttcataactttatcgttctcatcgttcgggcaaccaagtagagccgatgtggaacgtaagctagaggagctagagacactcgtgaagagctgtgtagggaaaggagtgattctaaatctgggagatctaaactggttcgtagagtcaagaaccagaggttcttcactgtataacaacaacgatagctactgtgttgtggagcatatgataatggagattgggaagttggcttgtgggttagtcatgggagatcatggaaggttttggttaatgggtcttgcgacttcacagacttacgtgagatgcaagtctggtcaaccctcgcttgaatctctctggtgtctcactactcttactattccggcgactagtaatagtctccggttgagtctcgtctccgagagtgagcttgaagtcaagaaatcagagaacgtgtctctccagctgcagcaatcatcggatcagctcagtttctgtgaggaatgttccgtcaagtttgaatcggaagctcgattcttaaagagtagcaatagcaatgtaaccactgtagcattaccggcatggcttcagcagtataagaaggagaatcaaaatagtcacactgattcagattctattaaggaacttgtggtgaagtggaactcaatctgtgattcaatccacaaaagaccatctctaaaaacactcacactctcttctcctacttcttccttttctggttccactcaaccttcaatcagtactcttcatcatcttcaaaccaacggtgattggcccgtgatcgagacaaacacgcatcgtcatcattctgttgtccatgagacatctcacttaagactgttcattccagaacatgacagcgagcaaaagactgagctagtctgttcgaatcctaattctacaatgaactctgaagcctcttcaagcgatgcaatggagttggaacatgcctcttcaaggtttaaagagatgaatgcagaaaacctagcaactttatgtgctgccttggaaagcaaggtaccgtggcaaaaggatttagtcccggagttagccaaaacagtcttgaaatgcaggtcaggatcgagtacgaggaagattaacggaaacgaggataaaaaagaagatacatggatgttcttccaaggtcttgatgtagatgctaaagagaagatcgctagagaattggccaaactcgtgtttggatcgcaagacagctttgtctctatctgtttgagtagtttctcgtcgacaagatcggattctgcagaagatttgaggaacaagaggttgagagatgaacaaagcctgagttacatagagagattctcggaagctgtttcgttggatccaaatagagtgatcttagttgaagatattgagcaagctgattatttgtctcaagtgggtttcaagagagctgttgagagaggaagagtttgtaattcgagtggtgaagaagcttcgcttaaagacgcgattgtgatcttgagctgtgaaagatttcgttcaagatcaagagcttgttctcctcctagtaaccagaaatcggacggttcagatcaacctgaggacaagaatgttgctacttgtgttgcacttgatctaaacctatctattgatagtgcgtacgtttgtgaagaagaatcatgtgatgagattggcttactcgaagcggtagatgcacggtttcatttcaagtgttcatcaacataa

SEQ ID NO: 2 - protein, 815 aa, Arabidopsis thaliana
  [CDS]:1..2448 from SEQ ID NO 1
MRAGGCTVEQALTADAANVVKQAMGLARRRGHAQVTPLHVASTMLSAPTGLLRTACLQSHTHPLQCRALELCFNVALNRLPTSTGSPMLGVPTSPFPSISNALGAAFKRAQAHQRRGSIESQQQPILAVKIEVEQLIISILDDPSVSRVMREAGFSSPQVKTKVEQAVSLEICSKTTSSSKPKEGKLLTPVRNEDVMNVINNLVDKKRRNFVIVGECLATIDGVVKTVMEKVDKKDVPEVLKDVKFITLSFSSFGQPSRADVERKLEELETLVKSCVGKGVILNLGDLNWFVESRTRGSSLYNNNDSYCVVEHMIMEIGKLACGLVMGDHGRFWLMGLATSQTYVRCKSGQPSLESLWCLTTLTIPATSNSLRLSLVSESELEVKKSENVSLQLQQSSDQLSFCEECSVKFESEARFLKSSNSNVTTVALPAWLQQYKKENQNSHTDSDSIKELVVKWNSICDSIHKRPSLKTLTLSSPTSSFSGSTQPSISTLHHLQTNGDWPVIETNTHRHHSVVHETSHLRLFIPEHDSEQKTELVCSNPNSTMNSEASSSDAMELEHASSRFKEMNAENLATLCAALESKVPWQKDLVPELAKTVLKCRSGSSTRKINGNEDKKEDTWMFFQGLDVDAKEKIARELAKLVFGSQDSFVSICLSSFSSTRSDSAEDLRNKRLRDEQSLSYIERFSEAVSLDPNRVILVEDIEQADYLSQVGFKRAVERGRVCNSSGEEASLKDAIVILSCERFRSRSRACSPPSNQKSDGSDQPEDKNVATCVALDLNLSIDSAYVCEEESCDEIGLLEAVDARFHFKCSST

SEQ ID NO: 3 - DNA, 2361 bp, Zea mays
  source 1..2361: /organism="Zea mays" /mol_type="unassigned DNA"
  CDS 1..2361
atgcgtagcggcggctgcgcggtgcagcagaagctagcgggggacgcggccgccgtgatgcggcaggcggtgagcctggcgcgtcgccgggggcacgcgcaggtcacgccgctgcacgtcgccagcgccgtgctcttggacgccgggggcctcctccgcgccgcctgcctccggtcgcgggcgacttcccacccgctccagtgcaaggcgctggagctctgcttcaacgtcgccctcaaccgcctcgcgacggcggggggcccggccccgccgccggccatgttcgagttccacatccactccggccaccgcgagccggcgctgtccaacgcgctcgccgccgcgttcaagcgcgcgcaggggaaccagcgccggggcggcggctcggccgcggacggccagcaccagcagaacgtcgccgccaaggtggagctcgaccaactcgtcatctccatcctcgacgaccccagcgtcagccgcgtcatgcgcgaggccggcttctcgagcgccgaggtcaaggccaacgtcgagaaggccatctcgtcgtcggagcagtcctccaacacggcaagcagcagcagcgcttccccgagtaccattaccaaggagcccagagccaaggccgacgccgtccaagtcgtaggtgacgccgcgcgcgtgctcgactgcatggcgagcgggacgaaccggtgcgtggcggtcgtcggcgagagcgccgccgccgcggagggtgtggtcaaggcggtgatggacaaggtgagcaagggggagctgcggcgtcagcaccagcgcctcaagaacgcccagttcgtgcccttctcggccgcgtccttccagcgcacgccgagggaggaggtcgaggccagggccggcgacctgtgcgcgctcgtgcgcgagtgctgcgccgccggcaaaggcgtcgtgctcgtcctcgaggacctcggctacgcggcggaggcctggaccgccgcgctgtggacgagaagtgaccgcagcgcgcgtggcctccgccactactgccccgtcgagcacgcggtcatggagttgagcagcctcgtgcgcggcggcggaggccgcgacaaggacatgttctgggtgctggggttcgcggcctatgcgccctacacgagctgtaggtcggggcagccttctctggagaccgtcctgggactacgccccgtcgtcgtgccggacggcagcctcggcggcgaaagtgaggaaacacactgcggcgccggcacggtggtggcgccggcgagcgtcccctcgtggattcgccgttgccaaggtccagtagtcgtcactggatcggcgctcacgctgagcttctcatctccggcttcttcctcccactgtggctttacccatcatcatgacgacaccaacaagagctgcgtgccatggcatgatctcatggaccagcagcagcaaaagctgttgctgaaccgccggcacgatggtccactggccgagccatacgatcagctgtcgcccgcaaaccctaattcaggatcctctaataactcggtgtctagatctaactcatcggacggcgcgacgacggcttgccgccgccggccaaagttcaccgagctcagcgcggagaatctcaagatcctgtgccgcgcgctggagacgcgcgtaccgcgccacagagacatagctccgggtatcgccagcgccgtgctccagcgccgctccggcgtgacgaggacggcgcggccgaccccggcgacgtggctcctcttccgagggagggacaacgacggcaagatgtccatggctcgggagcttgccaggcttgtctttggctcgcacgacgacttcaccagcatcgccgcagcagcgtcaaagctcgcaccggatcactccggttccagcagccccggcaagcacagcctcaagaggcagaggtcgccgccggacaacgagcacggaggcttcatgcagacgttctacgaggcgatccgcgagaaccctcaccgtgtcgtcctgatcgatggcgtcgagcaccactcgaaactacaagccggcatcatgggttccatggagaacggaactgtgaggggttgcgatggtggtgtcgtcagcttggaggactccatcgtagtgtgctgtgaagcgttcgagtcgagatcgttgcctcgggtttcttcatccccgcggcctgtgaagcaaatgattacgagtgacgtcgacagcaaggtggaaggtgatgacgcagataaaggagtcgtgccacatttcagcttggatttgaatacctgcgccattgacgacggcgaaggggaggaagcgagtagttcttggtatgatgccatggagatccaaaatgatgtagacggcgttttcttcttctag

SEQ ID NO: 4 - protein, 786 aa, Zea mays
  [CDS]:1..2361 from SEQ ID NO 3
MRSGGCAVQQKLAGDAAAVMRQAVSLARRRGHAQVTPLHVASAVLLDAGGLLRAACLRSRATSHPLQCKALELCFNVALNRLATAGGPAPPPAMFEFHIHSGHREPALSNALAAAFKRAQGNQRRGGGSAADGQHQQNVAAKVELDQLVISILDDPSVSRVMREAGFSSAEVKANVEKAISSSEQSSNTASSSSASPSTITKEPRAKADAVQVVGDAARVLDCMASGTNRCVAVVGESAAAAEGVVKAVMDKVSKGELRRQHQRLKNAQFVPFSAASFQRTPREEVEARAGDLCALVRECCAAGKGVVLVLEDLGYAAEAWTAALWTRSDRSARGLRHYCPVEHAVMELSSLVRGGGGRDKDMFWVLGFAAYAPYTSCRSGQPSLETVLGLRPVVVPDGSLGGESEETHCGAGTVVAPASVPSWIRRCQGPVVVTGSALTLSFSSPASSSHCGFTHHHDDTNKSCVPWHDLMDQQQQKLLLNRRHDGPLAEPYDQLSPANPNSGSSNNSVSRSNSSDGATTACRRRPKFTELSAENLKILCRALETRVPRHRDIAPGIASAVLQRRSGVTRTARPTPATWLLFRGRDNDGKMSMARELARLVFGSHDDFTSIAAAASKLAPDHSGSSSPGKHSLKRQRSPPDNEHGGFMQTFYEAIRENPHRVVLIDGVEHHSKLQAGIMGSMENGTVRGCDGGVVSLEDSIVVCCEAFESRSLPRVSSSPRPVKQMITSDVDSKVEGDDADKGVVPHFSLDLNTCAIDDGEGEEASSSWYDAMEIQNDVDGVFFF

SEQ ID NO: 5 - DNA, 2520 bp, Glycine max
  source 1..2520: /organism="Glycine max" /mol_type="unassigned DNA"
  CDS 1..2520
atgagaggaggtatttgtagcatacagcttcaggctcttacacctgaagctgcaactgttgttaagcaagctgttaatcttgcaacaagaagaggccatgcacaagtgacacctcttcatgttgcaagtgccatgcttgcaacttccacaggccttctccgcaaggcttgtcttcagtgtcactctcaccccctccagtgcaaggctcttgagctttgtttcaacgttgcactcaaccgtctaccagcttccacttcaagccctcttctggcacctcaatattccaccccttcactctccaatgccttggttgcagccttcaaacgtgctcaggctcaccaacgccgtggttctattgagaaccagcagcagcatattctggccttgaagattgaggtggagcagctcgtgatttcaattcttgatgatcctagtgttagcagggtcatgagagaagctggtttctctagcacccttgtgaaaacaagggtcgaacaagctgtttcaatggaagtttgttcacaaaaggctcaagcaaaagaaaatatcactaagcctcatcatcaagttgttcttggtggtagaaataatgtgtctccatctggaccttttggtcaagttggtggctccttcatgaagcctaatttggaccatgttaacaatgatgatgtgactagtgtgttgagtgagttggcaaagagaagaaacacagttattgtaggggagagtgtgaccaatgctgagggtgtagttaggggagtgatagagaggtttgaggttgggaatgttcctggagacttgagaaacattagcaaggaggaggttgaacagaagcttatggaggttagaaaccttgtgaagagctatgtgggaggaggggttgttctttacttgggtgatctaaaatggctgtttgagttctgggctaattttcgtgagcaaaaaacaaactactgttctgtagagcacatggtcatggagcttaaaaaattggtatgtggtagtggggagtctagtagattgtggcttatggggatttcaacttttaagacatacatgaagtgtaaaatatgtcacccatccctagaaaccatttgggagcttcatcccttcacaattcctgttggcatcctcagcctaagtttaaatcttgacagtgattttcaagctcaagagagaaacaaggtatttttcaaggatgtggcttttgaagatagagcaggagtcagaaaccatctaacttgctgcagggattgcacaataaattttgaaaaagaagctcagagcataactagcactataagtaagaaagcttgcactactagtagcttgccaacgtggctccaaaattgtaaggaagagagaagtgacataatggaagatcaggaaaatgcaaggcttaaggatctgtgcaagaaatggaactcattatgcaactcaatacacagacacccttccattaatgagaaacaagttttctttgtttcatcatctccttcatctcccacttctgtttcctcacatgaaagaaagtccaactttcaccacagccacctaaattggccaatcatttctgaatcagaaaagtcaccaaaagaatgtgagttatacactgaaactggtgatgatggctatgatagcaactttataatgttcatgccagatagtgatgtccctaaaccagatcttctgtcaaatcccaactctagccccaactcagcttcttcaagcgaagcagtggatggtttggaaagcactcaaatgttcaaagaacctaatgctgagaatcataagattctgtgtgatgccttggagaaaaaggttccacagcataaagaagttattccagagattgcaagtaccgtccttcattgtagatcaggaatgagaaagagagatcagaaccactcgatgaagagagaagacaatcaagaaacatggatgttctttcttggtgtgaattctcaagccaaagagagcatctcaagagagctagctaaagttgtttttggctcttatagcaactttgtcacaattggcatgagtagtttctcttccccagaagatgatgatgattccactgatgaaaaatccaaaaggaagaggccaagagaagagttgaaaagcagttatgctcaaagattcggggaagcagtgaatgagaaccctcacagggtgttcttcttagaagacttggatcaagttgattacttttctcaaaagggtgtagagcaagcaattcaaagtggaagcataacacttcctggtggtgaatctgttcctctcatggatgccattgtcattttcagttgcgaaagcttcttctcttcaccaaagctgagaaaatcaccatgtgctgaaaacaaagggaaagagactgtggaagatgaaagttctagcctctctttggatctgaacatagccattgaagatgaaagtggaggtgtggcattcggtggagacaatggtatcctagagttagttgataaacaaattaatttcaacatacaagaatcgtga

SEQ ID NO: 6 - protein, 839 aa, Glycine max
  [CDS]:1..2520 from SEQ ID NO 5
MRGGICSIQLQALTPEAATVVKQAVNLATRRGHAQVTPLHVASAMLATSTGLLRKACLQCHSHPLQCKALELCFNVALNRLPASTSSPLLAPQYSTPSLSNALVAAFKRAQAHQRRGSIENQQQHILALKIEVEQLVISILDDPSVSRVMREAGFSSTLVKTRVEQAVSMEVCSQKAQAKENITKPHHQVVLGGRNNVSPSGPFGQVGGSFMKPNLDHVNNDDVTSVLSELAKRRNTVIVGESVTNAEGVVRGVIERFEVGNVPGDLRNISKEEVEQKLMEVRNLVKSYVGGGVVLYLGDLKWLFEFWANFREQKTNYCSVEHMVMELKKLVCGSGESSRLWLMGISTFKTYMKCKICHPSLETIWELHPFTIPVGILSLSLNLDSDFQAQERNKVFFKDVAFEDRAGVRNHLTCCRDCTINFEKEAQSITSTISKKACTTSSLPTWLQNCKEERSDIMEDQENARLKDLCKKWNSLCNSIHRHPSINEKQVFFVSSSPSSPTSVSSHERKSNFHHSHLNWPIISESEKSPKECELYTETGDDGYDSNFIMFMPDSDVPKPDLLSNPNSSPNSASSSEAVDGLESTQMFKEPNAENHKILCDALEKKVPQHKEVIPEIASTVLHCRSGMRKRDQNHSMKREDNQETWMFFLGVNSQAKESISRELAKVVFGSYSNFVTIGMSSFSSPEDDDDSTDEKSKRKRPREELKSSYAQRFGEAVNENPHRVFFLEDLDQVDYFSQKGVEQAIQSGSITLPGGESVPLMDAIVIFSCESFFSSPKLRKSPCAENKGKETVEDESSSLSLDLNIAIEDESGGVAFGGDNGILELVDKQINFNIQES

SEQ ID NO: 7 - DNA, 2598 bp, Glycine max
  source 1..2598: /organism="Glycine max" /mol_type="unassigned DNA"
  CDS 1..2598
atgagaggaggtatttgtagcatacagcttcaggctcttacacctgaagctacaactgttgtcaagcaagctgtgaatcttgcaacaagaagaggccatgcgcaagtgacacctcttcatgttgcaagtgccatgcttgcaacttccacaggccttcttcgtaaggcttgtcttcagtgtcactctcaccctcttcagtgcaaggctcttgagctttgtttcaacgttgcactcaaccgtttaccagcttccacttcaagccctcttctggctcctcaatattccaccccttcactctccaatgccttggttgcagccttcaaacgtgctcaggctcaccaacgccgtggttctattgagaaccagcagcagcatattcttgccttgaagatcgaggtggagcagctcgtgatttcaatccttgatgaccctagtgttagtagggtcatgagagaagctggtttctctagcacccttgtgaaaacaagggttgaacaagctgtttcaatggaagtttgttcacagaaggcttcttctgataggagccatgccaaagaaaatatcactaagccccatcatgttgttcttggtggtagtaataatgtgtctccatcatctggaccttttggtcaagttgctggtggctccttcatgaagcctaatttagaccatgttaacaatgatgatgtaactagtgtgctgagtgagttggtgaggagaaaaaacacagttattgtaggggagggtgtggccaatgctgagggagtagctagggaagtgatggagaggtttgaggtagggaatgttcctggggacttaaggtatgtgcaatttgtgagccttcctctcatgtgcttcagaaacattagcaaggaggaagttgaacagaagcttatggagattagaaaccttgtgaagagctatgtgggaagaggggttgttctttacttgggtgatctaaaatggttgtttgagttctgggctaatttttgtgagcaaaaaagaaactactactgttctatagagcaaatggtcatggagcttaaaaaattggtatgtggtagtggggagtctagtagactgtggcttatggggattgcaacttttaaggcatacatgaagtgtaaaatatgtcacccatccctagaagctatttgggagcttcaccccttcacaattcctgttggcagcctcagcctaagtttaaattttcacagtgattttcaagctcaagagagaagcaaggtgtttttcaaggatgtggcttttgaagatagaacaggagtcagaaaccatctaacttgctgcagggattgcttgataaattttgaaaaagaagctcagagcataactaactgtataagtaagaaagtttgcactgctagtagcttgccaacgtggcttcaaaattgtaaggaagagagaagtgacataatggaagatcaggaaagttcaaggcttgagtatctgtgcaagaaatggaattccttatgcaattcaatacacagacgacacccttccattattgagaaaccagctgttttctttgtttcatcatccccttcatctcccacttctgtttcctcaaatgaaagaaagtccaactttcatcacagccacctaaattggccaatcatttctgaatcagaaaagtcaccaaaagaatgtgagttatacactgaaactggtgatgatgatgatgatggctatgatagcaactttataatgttcatgccagatagagatgtccctaaaccagatcttctgtcaaatccaaactctagccccaactcggcttcttcaagtgaagcagtggatggtttggaaagcactcaaatgttcaaggaacctaatgctgagaatcataagattctgtgtgatgctttggagaaaaagattccacagcataaagatgttattgttccagagattgcaagtactgtccttcattgtagatcaggaatgagaaaaagaggattaaaccacttgatgaacagagaagaaaatcaagaaacttggatgttctttcttggtgtgaattcccaagccaaagagagcatctcaagggagctagctaaagttgtttttggctcttatagcaactttgtctcaattggcatgagcaatttctcttccccagaagatgatcatgattccactgatgaaaaatccaaaaggaagaggccaagagaagagttgaaaagcagttatgttcaaagattcggggaagcagtgaatgagaaccctcatagggtgttcttcttggaagacttggatcaagttgattacttctctcaaaagggtgtaaagcaagcaattcaaagtggaagcataacactccctagtggtgaatctgttcctctcaaggatgccattgtcattttcagttgcgaaagcttctcttcaccaaagttgagaaaatcaccatgtgctgaaaacaaagggaaagagatcactgtggatgatgaaagttctagcctctctttggatctgaacctagccattgaagatgaaagtggaggtgtggcattaggtggagacaatggcatcctagagttagttgacaaacaaattaatttcaacatacaagaattgtga

SEQ ID NO: 8 - protein, 865 aa, Glycine max
  [CDS]:1..2598 from SEQ ID NO 7
MRGGICSIQLQALTPEATTVVKQAVNLATRRGHAQVTPLHVASAMLATSTGLLRKACLQCHSHPLQCKALELCFNVALNRLPASTSSPLLAPQYSTPSLSNALVAAFKRAQAHQRRGSIENQQQHILALKIEVEQLVISILDDPSVSRVMREAGFSSTLVKTRVEQAVSMEVCSQKASSDRSHAKENITKPHHVVLGGSNNVSPSSGPFGQVAGGSFMKPNLDHVNNDDVTSVLSELVRRKNTVIVGEGVANAEGVAREVMERFEVGNVPGDLRYVQFVSLPLMCFRNISKEEVEQKLMEIRNLVKSYVGRGVVLYLGDLKWLFEFWANFCEQKRNYYCSIEQMVMELKKLVCGSGESSRLWLMGIATFKAYMKCKICHPSLEAIWELHPFTIPVGSLSLSLNFHSDFQAQERSKVFFKDVAFEDRTGVRNHLTCCRDCLINFEKEAQSITNCISKKVCTASSLPTWLQNCKEERSDIMEDQESSRLEYLCKKWNSLCNSIHRRHPSIIEKPAVFFVSSSPSSPTSVSSNERKSNFHHSHLNWPIISESEKSPKECELYTETGDDDDDGYDSNFIMFMPDRDVPKPDLLSNPNSSPNSASSSEAVDGLESTQMFKEPNAENHKILCDALEKKIPQHKDVIVPEIASTVLHCRSGMRKRGLNHLMNREENQETWMFFLGVNSQAKESISRELAKVVFGSYSNFVSIGMSNFSSPEDDHDSTDEKSKRKRPREELKSSYVQRFGEAVNENPHRVFFLEDLDQVDYFSQKGVKQAIQSGSITLPSGESVPLKDAIVIFSCESFSSPKLRKSPCAENKGKEITVDDESSSLSLDLNLAIEDESGGVALGGDNGILELVDKQINFNIQEL

SEQ ID NO: 9 - DNA, 2787 bp, Zea mays
  source 1..2787: /organism="Zea mays" /mol_type="unassigned DNA"
  CDS 1..2787
atggcaagttggcaaccacctgcagctctacatctacgcacacatctccgtgatctcttcagcctcgcgactgccaccaaatcggtcttggcaggttgctgcgccaaatcggccggtcttggcaggttgctgcgccaaatcggccggtcttggcaggttgcgctagctacccataggttggctggagagatgagggccggggggtgcacggtgcagcagtcgctgacagcggaggccgcggcggtggtgaagcaggcggtgagccttgcgcggcggcgcgggaacgcgcaggtcacgccgctgcacgtggcgagcgcgatgctggcggccgcacccgcggggcagctgctgcgcgcggcgtgcctccgctcacactcccacccgctgcagtgcaaggcgctggagctgtgcttcaacgtggcgctcaaccgcctccccgcgtcggcatcgtcgccgctgctcggcggcaaccaccactgctaccacccgccgtccctgtccaacgcgctcgtcgcggcgttcaagcgcgcgcaggcgcaccagcggcgcggcggctccgtcgagagccagcatcagcagccggtggtcgccgccgtcaagatcgagctggaccagctcgtcgtctccatcctcgacgaccccagcgtcagccgcgtgatgcgcgacgccggcttctccagcacccaggtcaaggccaacgtggagcaggccgtgtgcagcagcagcaccatggctacggccgcagccgcacccagcaaaaaccctaaccctagcagctcggccaccaccacaagcccaccgcctaaagaagctaaagccaagccgccgctcgcgctccaccaccaagcgcgcgacgaggacgtcgccgccgtcctggactgcctggcctcgcggagcaagaggagggtcgtcgtcatcgcggagagcgcggccgcggccgaggccatggcgcacgcggccgtggacaagatcaagagaggcgaggtgaagcacgagcacgacgcgctgcgaggcgcgcaggtcgtcagcctccgcgtgtcgtcgttccgtgagatgccgagggaggaggccgagcggcggctcggcgagctgcggtgccttgtcaagcagggcaggaggcagcgggtcgtgctcgtcgtggaggacctcaagtgggcggcggagttctgggccggccacgacggccagagcgggaggagaggcgggtactactactgcgccgtcgagcacgtcgtcaacgagctgcgcgccctggcgagcggcggcagcctgtgctggctcctcgggttcgggacgtaccaggcctacacgaagtgtcgggtggggcagccgtcgctggagagcctgtgggggctccagacgctcaccgtgcccgccggcagcctcgcgctcagcctcacctgcgccttcgacgacagtgccctaggcacagtcaatcagtccctgaaagcgggctctgacgcggatgggaacgggccggcgtcttgctggccgcttttgggcggcagccagctgagcctgagctccagatgctgcggcgacggcgattgctctgccgcgaggatcgacacgaaagcggcgttgcctcggccctctgtctcatcgtccaacctcccttcctggcttcagcattgccgtgatcatcaggagcctactacgagccatcttacggatcttagcaagagcaagacatggagctccatctgcagcaggccgtcgcagcggatgacgctgcatttttccgcaccggtgtctccggcctcctccatctcctcctacgagcacggcggcgaccagtcgtcgcagacgccgcctcagcactcgtggctccttgctggtctcgacgccgcgcaccaccggtgggaacccaagcgcgagaccagcgggaataaggccgccagcaggtcccacgactccggcgcctcgaacggcggctccgtggaggtggagtgccgcgccaggttcaaggagctcagcgccgagaacctcaagctgctctgcggcgcgctggagaaggaagtgccgtggcagaaggagatcatcccggaggtcgccagcgccgtcctgcagtgccggtcagggatcgccaagaggcgcgacaagtcgaggtcggcggacgcaaaggaggagacgtggatgctcttcctcggaggcgacgccgacggcaaggagagggtggcgagggagctcgccagcctcgtcttcgggtcacgcgacagcttcttagccatcaggcctggtgcctcgtcgtcgtcgccgccgcggtcaggttcctccgagggtcaccggagtaacaagcggccacggatgtcgccgccgccgcctggggaggagtcggcgccggcctgcctggaacggttgcacgacgctgtatccgagaacccgcaccgggtcatattcatggagggcgtcgagcaggctggccgggactgccagctcggcatcaaggaggcgatcgagagcggggtcgtgcggaaccgagctggcgtggaggtcggcgtgggcgatgccatcgtcgtcctgagctgcgagggctttggcagcaccggcaggtccagagcttgctcgccaccgagcaagaaggtgaaggtagagatggaggaggctaaggaggagcgcacaggtgacattgaacacaacggagatggtggttcctcgtcgtctccgtcgtgcatcgatttgaacgtggacatggagagtgaccaggcggacgagggaagtctcgatgatgatgtctgtctgctcacagccgtcgacaggaccctgttcttcagaagacaggggtga

SEQ ID NO: 10 - protein, 928 aa, Zea mays
  [CDS]:1..2787 from SEQ ID NO 9
MASWQPPAALHLRTHLRDLFSLATATKSVLAGCCAKSAGLGRLLRQIGRSWQVALATHRLAGEMRAGGCTVQQSLTAEAAAVVKQAVSLARRRGNAQVTPLHVASAMLAAAPAGQLLRAACLRSHSHPLQCKALELCFNVALNRLPASASSPLLGGNHHCYHPPSLSNALVAAFKRAQAHQRRGGSVESQHQQPVVAAVKIELDQLVVSILDDPSVSRVMRDAGFSSTQVKANVEQAVCSSSTMATAAAAPSKNPNPSSSATTTSPPPKEAKAKPPLALHHQARDEDVAAVLDCLASRSKRRVVVIAESAAAAEAMAHAAVDKIKRGEVKHEHDALRGAQVVSLRVSSFREMPREEAERRLGELRCLVKQGRRQRVVLVVEDLKWAAEFWAGHDGQSGRRGGYYYCAVEHVVNELRALASGGSLCWLLGFGTYQAYTKCRVGQPSLESLWGLQTLTVPAGSLALSLTCAFDDSALGTVNQSLKAGSDADGNGPASCWPLLGGSQLSLSSRCCGDGDCSAARIDTKAALPRPSVSSSNLPSWLQHCRDHQEPTTSHLTDLSKSKTWSSICSRPSQRMTLHFSAPVSPASSISSYEHGGDQSSQTPPQHSWLLAGLDAAHHRWEPKRETSGNKAASRSHDSGASNGGSVEVECRARFKELSAENLKLLCGALEKEVPWQKEIIPEVASAVLQCRSGIAKRRDKSRSADAKEETWMLFLGGDADGKERVARELASLVFGSRDSFLAIRPGASSSSPPRSGSSEGHRSNKRPRMSPPPPGEESAPACLERLHDAVSENPHRVIFMEGVEQAGRDCQLGIKEAIESGVVRNRAGVEVGVGDAIVVLSCEGFGSTGRSRACSPPSKKVKVEMEEAKEERTGDIEHNGDGGSSSSPSCIDLNVDMESDQADEGSLDDDVCLLTAVDRTLFFRRQG

SEQ ID NO: 11 - DNA, 2589 bp, Zea mays
  source 1..2589: /organism="Zea mays" /mol_type="unassigned DNA"
  CDS 1..2589
atgagggccggggggtgcacggtgcagcagtcgctgacggcggaggccgcggcggtggtgaagcaggcggtgagccttgcgcggcggcgcgggaacgcgcaggtgacgccgctacacgtggcgagcgcgatgctagcggcgcccacggggttgctgcgcgcggcgtgcctccgctcgcactcccacccgctgcagtgcaaggcgctggagctgtgcttcaacgtggcgctgaaccgcctccccgcgtcggccgcggtcgcctcgtcgccgctgctcggcgggcacggccaccaccaccaccaccactactacccgccgtccctgtccaacgcgctcgtggcggcgttcaagcgcgcgcaggcgcaccagcggcgcgggtccgtggagagccagcagcagccggtgctcgccgtcaagatcgagctggagcagctcgtggtgtccatcctcgacgaccccagcgtcagccgcgtgatgcgcgaggctggcttctccagcacccaggtgaaggccaacgtggagcaggccgtgtgcagcagcaccaccacaacaagcaccgcggccgcggccaccgctcccagcaaaaaccctaatcctagcagctctgctgccaccgcaagcccacctcaggaagccgccaaaggcaacaagctgccgctccaccaagcgcgcgacgaggacgtcgccgccgtcctggactgcctggcctcgcggagcaagaggagggtggtcgtcatcgcggagagcgcggcggcggccgaggccacggcgcatgcggccatggacaagatcaagagcgccgaggcgaagcacgacgcgctgcgaggcgcgcaggtcgtcagcgtccgcgtgtcgtcgttccgcgagatggcgagggaggagaccgagcggcggcttggcgagctgcggtgcctcgtcaggggcaggagggggcaggtcgtcgtgctcgtcgtggaggacctcaagtgggcggccgagttctgggcgggtcacgtcgtccagagcgggaggagagggtactactactgctccgtcgagcacgtcgtcaccgagctgcgcgccctggcgagcggcggcggcggcagcctgtgctggctcctcgggttcgggacgtaccaggcctacacgaggtgtcgggtggggcagccgtcgctggagagcctgtgggagctccagacgctcaccgtgcccgccggcagcctcgcgctgagcctcaactgcgccttcgacgacagtgctctaggtctaggcacggtcaatcagtccatgaaagcgggctcatctgacacggatgggaacggaccagcgtcttgctggccgcttttggccggcagcaagctgatctccagatgctgcggcggcgactgctccgccgcgaggatcgagacgacgaaggcggcgctgcctcggacgccgttcgtctcgtcgtccagcctcccttcctggctccagcattgccgtgatcatcaggagcccgctacccatcttacggatgatctcggcaagacatggagctccatctgcagcagcagcaggccgtcacagcgaacgacgacgctgcatttctcggcgccggtgtctccggcctcctccatctcttcctacgagcacggcggcggccagtcgcagcagcctcgccactcgtggctcctcgccggcctcgacgccgcgcaccacccgtggagacccaagcgcgaggccagcatcaggtcccacgactccggcgcctccaacggctccgtggaggtggagtgccgcgccaggttcaaggagctcaacgccgagaacctcaagctgctctgcggcgcgctggagaaggaggtgccgtggcagaaggagatcgtccccgaggtcgcgagcgccgtcctgcagtgccggtcggggatcgccaagaggcgcgacaagtccaggtcggcggacgccaaggaggagacgtggatgctcttcctcggaggcgacgccgacggcaaggagagggttgcgagggagctcgccaggctcgtgttcgggttacgcagcagctttttgtccatcaggcctggcggtgtcgtctccgcctcgtcgccaccgccggcctcgtcaggctcctccgaggggcacaggagtagtaagcgcccacggatgccggaggaggagccggcggcctactacctagagcggttgcacgaggctgtctccgaaaacccacaccgggtcatattcatggaggacgtcgagcgggctgaccgggactgccagctccgcatcaaggaggcgatcgagagcggggtggtgcggaaccatgctggtcaagaggtcggcgtgggcgacgccatcgtcatcctcagctgcgagagctttggcgacagcaggtctagtagagcttgctcgccgccgagcaagaaggtgaaggtagagatggaggaggccaaggaggagcgcgcaggtgaccatgaacacaaccaagatggtgtttccaagccgtctccatcttgcatagatttgaacgtggacatggagagtgatcaggcggacgagccaagtctcggtgatcagtgtctgctcacggccgtcgacagggccctattcttcagaagacaggacaactag

SEQ ID NO: 12 - protein, 862 aa, Zea mays
  [CDS]:1..2589 from SEQ ID NO 11
MRAGGCTVQQSLTAEAAAVVKQAVSLARRRGNAQVTPLHVASAMLAAPTGLLRAACLRSHSHPLQCKALELCFNVALNRLPASAAVASSPLLGGHGHHHHHHYYPPSLSNALVAAFKRAQAHQRRGSVESQQQPVLAVKIELEQLVVSILDDPSVSRVMREAGFSSTQVKANVEQAVCSSTTTTSTAAAATAPSKNPNPSSSAATASPPQEAAKGNKLPLHQARDEDVAAVLDCLASRSKRRVVVIAESAAAAEATAHAAMDKIKSAEAKHDALRGAQVVSVRVSSFREMAREETERRLGELRCLVRGRRGQVVVLVVEDLKWAAEFWAGHVVQSGRRGYYYCSVEHVVTELRALASGGGGSLCWLLGFGTYQAYTRCRVGQPSLESLWELQTLTVPAGSLALSLNCAFDDSALGLGTVNQSMKAGSSDTDGNGPASCWPLLAGSKLISRCCGGDCSAARIETTKAALPRTPFVSSSSLPSWLQHCRDHQEPATHLTDDLGKTWSSICSSSRPSQRTTTLHFSAPVSPASSISSYEHGGGQSQQPRHSWLLAGLDAAHHPWRPKREASIRSHDSGASNGSVEVECRARFKELNAENLKLLCGALEKEVPWQKEIVPEVASAVLQCRSGIAKRRDKSRSADAKEETWMLFLGGDADGKERVARELARLVFGLRSSFLSIRPGGVVSASSPPPASSGSSEGHRSSKRPRMPEEEPAAYYLERLHEAVSENPHRVIFMEDVERADRDCQLRIKEAIESGVVRNHAGQEVGVGDAIVILSCESFGDSRSSRACSPPSKKVKVEMEEAKEERAGDHEHNQDGVSKPSPSCIDLNVDMESDQADEPSLGDQCLLTAVDRALFFRRQDN

SEQ ID NO: 13 - DNA, 2625 bp, Glycine max
  source 1..2625: /organism="Glycine max" /mol_type="unassigned DNA"
  CDS 1..2625
atgagaactggaagctgcgccgtgcaacagggtctaaccccggaggccgcgagcatagtgaagcaagccgtgacgctggcgaagcgtcgcggccatgcacaggtgacgcccctccacgtggcgaacaccatgctctccatcaccaacggtcttctgagaaccgcgtgtctccaatcccactcccaccctctccagtgcaaggccttggagctttgcttcaacgttgccctgaatcgcttaccggcttcgacttcttctagccccatgttgcaaggctctcaccaccaccactctcacgcgtgcccctccatctcaaacgctttggttgcagcgttcaaacgcgctcaagcccaccagcgacgtggatccgtcgagaatcagcaacaacctctcttggcagttaaaataaaactcgagcaactcattatttcgatcttggatgaccctagtgttagccgagtcatgagagaagctggtttctctagcacccaagttaaaagcaacgttgaacaagctgtttctttggaaatatgctctcaggataatggtagtggtaaaaataacaacaatagtaataaggcaaaggaaaacaatagcagtggagagaaagggtcggtgttggatcctattagggttgaggatgttgctagtgttattgaaaatttggggagtgagagaaagagaagtgttgtgattgtgggagagtgtgttactagtcttgaaggtgtagttaggggagtgatggaaaaagttgataaaggggatgttggtgatgagtgtactcttaggggtgttaagtttatctctctttctctttcttcttttgggaatgtttcgagagtggaggtggagcaaaaggtgggggagcttaggagtcttgtgaaggcaagtgaacatagcaaagggtatgttttgtatttgggggatctcaaatgggtgtttgattttagggctcgtggatcacaagggggagggtgttattgtcctgtggatcacatggtagtagagattgggaagcttgtgaatggggttgaagagaatggtgcaaggttttgggtgatgggtgttgccacttttcaagcttacatgagatgcaaaaatggccagccatcgttggagactctttggggtcttcatcctatcactattcctgcggggagcttgcgcttgagtctcatcactgacagtggtgtacaaaaccagcccacaaacgagaaagctgacaacagaactacctggctcttacttgaaggagtgggggatgatcacaaacaacaaccttgcttcgcggaaccttccaccaagaatgagaccaccgaagttcgaagcttgcaaagcagtagtacttgtaatagtgactcaagttcaacccttcctgcatggctccaacagtacaaaaatgagaataaaggaatcacccataatgatcagaactgtgtcccagtgggagagctttgcaaaaagtggaactctatgtgtagttcaatccaaaagcaaccttatccttccgacaaaaccctctcattatcctcggtgtcaccttcttcatcaaactcaaacttctcatacgaacagcagcatcctaatttgctccaaacccatcacgagtggcaagtgggtgaaccacccaaagattcattgaacaactaccatttctggatctccaacaatggcaccaacaacaacaccaatgaacccactttgagagtgtacattccagagaataacaataagcaaccattctcatcaccaaatccaagttcaaaccctaattccacttcttccagtgacatcatggaagtggagcacgtgagagagttcaaagagttaaacacggagaatctgaaaacactgtgcaatgctttggagaaaaaagtgccgtggcagaaagacataatacccgaaattgcgagcacccttttgcaatgccgttctggcatggtgagaagaaaagggaaagtgatgagaaacagtgaagaagtgaaagaagagacgtggttgttcttccaaggtgttgatgttgaagccaaggagaaaatagcaagagaactagctagacttgtttttgggtcccaaaacgacgtcgtttcgattgcacttagcacttttgcttcaacaagagcagattctactgaagattatagcaggaacaaaagatcaagagaagaaacaagttgcagttacattgagaggttcgcagaagcaatggcttgtaaccctcacagagtgtttcttgttgaagatatagagcaagcagattattgttctcaacttggtttcaaaagggccattgagaggggaagggttgcggattcaaaaggcgaagaggttgcactttgcgatgctatcatcattctaagctgtgaaagtttcagttctaggtcaagggcttgttctccgtcggtcaaacaaaaaccgctgactgaggaagaaaagaatggtggtgacatggttgcaactttggaggtgacaagtccttgtgtttctttggatttgaatatttccattgatgatgaaaacgaggttgaggataagtcagtggatgaaattgggcttcttgaatcagtagacaaaaagctagggatgaaagaaattgcgtgcccttcaactttattatgtaactag

SEQ ID NO: 14 - protein, 874 aa, Glycine max
  [CDS]:1..2625 from SEQ ID NO 13
MRTGSCAVQQGLTPEAASIVKQAVTLAKRRGHAQVTPLHVANTMLSITNGLLRTACLQSHSHPLQCKALELCFNVALNRLPASTSSSPMLQGSHHHHSHACPSISNALVAAFKRAQAHQRRGSVENQQQPLLAVKIKLEQLIISILDDPSVSRVMREAGFSSTQVKSNVEQAVSLEICSQDNGSGKNNNNSNKAKENNSSGEKGSVLDPIRVEDVASVIENLGSERKRSVVIVGECVTSLEGVVRGVMEKVDKGDVGDECTLRGVKFISLSLSSFGNVSRVEVEQKVGELRSLVKASEHSKGYVLYLGDLKWVFDFRARGSQGGGCYCPVDHMVVEIGKLVNGVEENGARFWVMGVATFQAYMRCKNGQPSLETLWGLHPITIPAGSLRLSLITDSGVQNQPTNEKADNRTTWLLLEGVGDDHKQQPCFAEPSTKNETTEVRSLQSSSTCNSDSSSTLPAWLQQYKNENKGITHNDQNCVPVGELCKKWNSMCSSIQKQPYPSDKTLSLSSVSPSSSNSNFSYEQQHPNLLQTHHEWQVGEPPKDSLNNYHFWISNNGTNNNTNEPTLRVYIPENNNKQPFSSPNPSSNPNSTSSSDIMEVEHVREFKELNTENLKTLCNALEKKVPWQKDIIPEIASTLLQCRSGMVRRKGKVMRNSEEVKEETWLFFQGVDVEAKEKIARELARLVFGSQNDVVSIALSTFASTRADSTEDYSRNKRSREETSCSYIERFAEAMACNPHRVFLVEDIEQADYCSQLGFKRAIERGRVADSKGEEVALCDAIIILSCESFSSRSRACSPSVKQKPLTEEEKNGGDMVATLEVTSPCVSLDLNISIDDENEVEDKSVDEIGLLESVDKKLGMKEIACPSTLLCN

SEQ ID NO: 15 - DNA, 2610 bp, Glycine max
  source 1..2610: /organism="Glycine max" /mol_type="unassigned DNA"
  CDS 1..2610
atgagaacaggaagctgcgccgtgcaacagggtctaaccccagaggccgcgagcatagtgaagcaagcggtgacgcttgcgaagcgtcgcggccacgcgcaggtgacgcccctccacgtggcgaacaccatgctttccatcaccaacgggcttctgagaacagcttgtctccaatcccactctcaccctctccagtgcaaggccttggagctttgcttcaacgttgccctaaatcgcttaccggcttcgacttcttcgagtcccatgttgcaaggctctcaccaccaccactctcacgcgtgcccctctatctcaaacgcccttgttgcagctttcaaacgcgctcaagcacaccaacgacgtggatctgttgagaatcagcaacagcctctcttggcagtgaaaattgaactcgagcaactcattatttcgatcttggatgaccctagtgttagccgagtcatgagagaagctgatttcaatagcacacaagttaaaagcaacgttgaacaagcggtttctttggaaatatgctctcagaataatggtagtggtaataacaataacaacaataataataaggcagaggaaaataatagtagtagtggagagaaagggttggtgttggatcctattagggttgaggatgttgctagtgttattgaaaatttggggtgtgagagaaagagaagtgttgtgattgtgggagagtgtgttactagccttgaaggtgtagttaggggagtgatggaaaagattgataaaggggatgttggtgatgagtgtactctcaggggtgtcaagtttatctctctttctctttcttcttttgggaatgtttcaagagtggaggtggagcaaaaggtggaggagcttaggggtcttgtgaaggcaagtgaacatagcaaagggtatgttttgtatttgggggatctcaagtgggtgttagattttagggctagcggatcacaaggcagagggtgttattgtcctgtggatcacatggttggggagattgggaagcttgtgaatgggactgaagagaatggtggaaggttttgggttatgggtgttgccacttttcaagcttacatgagatgcaaaaatggccagccatcgttggagactctttggtgtcttcatcctatcactattcctgctggaagcttgcgcttgagtctcatcactgacagtggtctacaagaccagcccacaaacaagaaagctgacaacagaactagctggctcttacttgaaggagtgggggatgatcagaaacaacaagcttgcttcgcggaaccttccacaaagaatgagaccatcaccgaagttcgaagcttgcaaagcagtagtacttgtaatagtgactcctcaagttcaacccttcctgcatggctccaacagtacaaaaatgagaataaaggaatcaactataatgatcagaactctgtcccagtgggagagctttgcaaaaagtggaaatttatgtgtagttcaatccaaaagcaaccttatccttccgacaaaaccatcacattatcctcggtgtcaccttcttcatcaacctcaaacttctcatacggacaacaacatcctaatttgcaccaaacccataacgagtggcaagtggctgaaccacccaaagattcattaaacaaccaccatttctggatctccaacaatggttccaacaacaccaatgaacccactttgagagtgtacattccagagaacaataagcaaccattctcatcaccaaatccaagttctaaccctaattccacttcttccagtgacatcatggaagtggaacacgtgagcaagttcaaagagttaaactcggagaatcttaaaaccttatgcaatgctttggagaaaaaattgccgtggcagaaagacataatacccgaaattgcgagcacccttttgcaatgccgttctggcatggtgagaagaaaagggaaagtgatgataaacagtgaagaagtgaaagaagaaacgtggttgttcttccaaggtgttgatgttgaagccaaggagaaaatagcaagagaattggctcggcttgttttcgggtcccaaaaccacgtcgtttcgattgcacttagcacttttgcttcaacaagagcagattctactgaggattatagcaggaacaaaagatcaagagaagaaacaagttgcagttacattgaaaggttcgtagaagcaatggcttctaaccctcatagggtgtttcttgttgaagatatagagcaagcagattattgttctcaacttggtttcaaaagggccattgagaggggaagagtggtggattcaaaaggtgaagaggttgcacttcgtgatgctatcatcattctaagctgtgaaagtatcagttctaggtcaagggcttgttctccctcggtcaaacaaaaatcgttaaccgaggtagaaatgaatggcgacattaataatgccactttggaggagacaagcccttttgtttctttggatttgaatatttccattgatgatgaaaacaatgttgaggataggtcagaggatgaaattgggcttcttgaatcggtagacggaaaagttatcttcaactttgaggaattgtga

SEQ ID NO: 16 - protein, 869 aa, Glycine max
  [CDS]:1..2610 from SEQ ID NO 15
MRTGSCAVQQGLTPEAASIVKQAVTLAKRRGHAQVTPLHVANTMLSITNGLLRTACLQSHSHPLQCKALELCFNVALNRLPASTSSSPMLQGSHHHHSHACPSISNALVAAFKRAQAHQRRGSVENQQQPLLAVKIELEQLIISILDDPSVSRVMREADFNSTQVKSNVEQAVSLEICSQNNGSGNNNNNNNNKAEENNSSSGEKGLVLDPIRVEDVASVIENLGCERKRSVVIVGECVTSLEGVVRGVMEKIDKGDVGDECTLRGVKFISLSLSSFGNVSRVEVEQKVEELRGLVKASEHSKGYVLYLGDLKWVLDFRASGSQGRGCYCPVDHMVGEIGKLVNGTEENGGRFWVMGVATFQAYMRCKNGQPSLETLWCLHPITIPAGSLRLSLITDSGLQDQPTNKKADNRTSWLLLEGVGDDQKQQACFAEPSTKNETITEVRSLQSSSTCNSDSSSSTLPAWLQQYKNENKGINYNDQNSVPVGELCKKWKFMCSSIQKQPYPSDKTITLSSVSPSSSTSNFSYGQQHPNLHQTHNEWQVAEPPKDSLNNHHFWISNNGSNNTNEPTLRVYIPENNKQPFSSPNPSSNPNSTSSSDIMEVEHVSKFKELNSENLKTLCNALEKKLPWQKDIIPEIASTLLQCRSGMVRRKGKVMINSEEVKEETWLFFQGVDVEAKEKIARELARLVFGSQNHVVSIALSTFASTRADSTEDYSRNKRSREETSCSYIERFVEAMASNPHRVFLVEDIEQADYCSQLGFKRAIERGRVVDSKGEEVALRDAIIILSCESISSRSRACSPSVKQKSLTEVEMNGDINNATLEETSPFVSLDLNISIDDENNVEDRSEDEIGLLESVDGKVIFNFEEL

SEQ ID NO: 17 - DNA, 2532 bp, Glycine max
  source 1..2532: /organism="Glycine max" /mol_type="unassigned DNA"
  CDS 1..2532
atgagagcaggagtttgcagcatacagctacaggctctgacatcagaggctgcaaccctagttaaacaagctgttactcttgccacaagaagagggcatgctcaagtgacccctcttcacattgccactgtcatgcttgctacttccacaggccttctccgcaaagcttgccttcaatgccactctcaccctctccaatacaaggcattggaactttgcttcaacgtttccctcaaccgtttgccagcatccacaccaaaccctcttctgataagtcctccatataattccaccactactactccctcactttccaatgccttggttgcagccttcaaacgtgctcaggctcaccaacgccgtggatccattgatcagaaccagcagcaacccattttgactttaaagattaaggtggagcagctcatagtctctatccttgatgaccctagtattagtagggtcatgcgagaagctggtttctctagctcccttgttaaaacaaggcaacaagcttattccaaggaaaacaccaccgagcttcaagttcttggtggtggctcattcaagtctatggaggaccttgttcatgatgatgctggtgatcatgtagtagatgatgtaactagtgttttgagcgaacttgtgagcaagagaagaaacacagtcattgttggggagagtcttgctagtcctgagggaatagttaggggactgatagagaatttagagagagggagtgttcaaggagagttgaggtttgtacaatttgtgagtctccctcttgtctccttcaggaacattggcaagaaggaggttgaaaggaagcttgtggagcttagaaaccttgtaaaaagtcatgtgggaagagggtttattctatacttgggtgatctgaagtggttgtttgagttctggtcaagttactgtgagcaaagaacaaactactactgttctgtggtgcatatagtgatggagcttaaaaaattgattagtggaaatggggagaatggtagattgtggcttatggggattgcaacttttggaacatacatgaagggccaagcatgtcacccctcccttgaaactatttgggatcttcacctctttacagttccagtgttactatcatccttgagacttggtttaacttttgatagtgattttcaagttcaggagagaagcaaggtaacattcaaggacgaatcttttgaagaacgagccaaagtgcgcaagtatctaacttgctgcagagatttctcattaaattttgaaaaagaagctaaaagcaccactaatagtattactataagcaagagagattgcaccactaacttgccaacatggctccaaaattgcaaggaagagagaagtcgcatcatggagaatcaggaaaatgctaagcttagggatatttgtaagaaatggaactcattttgcagttcagcgcatggatttccttccaatcctgagaaacaattttttttcatttcatcctctccttcatcccctacttcagtctcttcacatgaaagaaagcttagtttgaatctgaaacacctaaattggccactcatttctgaaccaaaacaagtacctaaagaatgtgagttatacactgagactactgttagtgatgattcctatgaaggaaacttgataatgttcatgccagagaagaacattcctaagccagaccttttgtcaaatcccaattctagccccaattctgcttcttcaagtgaggcagtggaaggtttggacagcactcaaatattcaaggagcataatgatgaaaatctaaagattctctgtgatgcattgttgaaaaaggtttcacaacagaaagaaatagttaaggagattgcaagcactgtgcttctttgcaggtcaggaatgagagaaggagtgaatcacttagtgaagagagatgataggcaagaaatttggtttttctttttaggtttggattctcaagcaaaagaaatggtctcaaaagagctagctaaagttgtttttggctcttacagtaactttgtttccattggtataagtagtttctcttccactcatgaggagtccaaaaataaaagaccaagagatgagtttggtggcagttatcttcagaggtttggggaagcactgaatgagaaccctcatagggtgttcttcttggaagatttggagcaagttgatcatttttctaaaaagggtgttaagaaaggaattgaaagtggaactataacccttcctggtggtgaatctgtgcctctcaaggatgcaattgtcattttcagtagtgaaagcttcagttcagtgccaagagcttgttctcctgcaagaaccacttctccattttccgatgaagacatggaaaagaataatattaacaaatcagaggagaaaactccatgcctctctttggatttgaacatggccattgaagttgatgtgcaaaaaaatgtgcatttagatggagacactgctgagatactagagttagttgataagcaaattaattttaaaatatga

SEQ ID NO: 18 - protein, 843 aa, Glycine max
  [CDS]:1..2532 from SEQ ID NO 17
MRAGVCSIQLQALTSEAATLVKQAVTLATRRGHAQVTPLHIATVMLATSTGLLRKACLQCHSHPLQYKALELCFNVSLNRLPASTPNPLLISPPYNSTTTTPSLSNALVAAFKRAQAHQRRGSIDQNQQQPILTLKIKVEQLIVSILDDPSISRVMREAGFSSSLVKTRQQAYSKENTTELQVLGGGSFKSMEDLVHDDAGDHVVDDVTSVLSELVSKRRNTVIVGESLASPEGIVRGLIENLERGSVQGELRFVQFVSLPLVSFRNIGKKEVERKLVELRNLVKSHVGRGFILYLGDLKWLFEFWSSYCEQRTNYYCSVVHIVMELKKLISGNGENGRLWLMGIATFGTYMKGQACHPSLETIWDLHLFTVPVLLSSLRLGLTFDSDFQVQERSKVTFKDESFEERAKVRKYLTCCRDFSLNFEKEAKSTTNSITISKRDCTTNLPTWLQNCKEERSRIMENQENAKLRDICKKWNSFCSSAHGFPSNPEKQFFFISSSPSSPTSVSSHERKLSLNLKHLNWPLISEPKQVPKECELYTETTVSDDSYEGNLIMFMPEKNIPKPDLLSNPNSSPNSASSSEAVEGLDSTQIFKEHNDENLKILCDALLKKVSQQKEIVKEIASTVLLCRSGMREGVNHLVKRDDRQEIWFFFLGLDSQAKEMVSKELAKVVFGSYSNFVSIGISSFSSTHEESKNKRPRDEFGGSYLQRFGEALNENPHRVFFLEDLEQVDHFSKKGVKKGIESGTITLPGGESVPLKDAIVIFSSESFSSVPRACSPARTTSPFSDEDMEKNNINKSEEKTPCLSLDLNMAIEVDVQKNVHLDGDTAEILELVDKQINFKI

SEQ ID NO: 19 - DNA, 2523 bp, Glycine max
  source 1..2523: /organism="Glycine max" /mol_type="unassigned DNA"
  CDS 1..2523
atgagaggaggtatttgtagcatacagcttcaggctcttacacctgaagctacaactgttgtcaagcaagctgtgaatcttgcaacaagaagaggccatgcgcaagtgacacctcttcatgttgcaagtgccatgcttgcaacttccacaggccttcttcgtaaggcttgtcttcagtgtcactctcaccctcttcagtgcaaggctcttgagctttgtttcaacgttgcactcaaccgtttaccagcttccacttcaagccctcttctggctcctcaatattccaccccttcactctccaatgccttggttgcagccttcaaacgtgctcaggctcaccaacgccgtggttctattgagaaccagcagcagcatattcttgccttgaagatcgaggtggagcagctcgtgatttcaatccttgatgaccctagtgttagtagggtcatgagagaagctggtttctctagcacccttgtgaaaacaagggttgaacaagctgtttcaatggaagtttgttcacagaaggcttcttctgataggagccatgccaaagaaaatatcactaagccccatcatgttgttcttggtgaccatgttaacaatgatgatgtaactagtgtgctgagtgagttggtgaggagaaaaaacacagttattgtaggggagggtgtggccaatgctgagggagtagctagggaagtgatggagaggtttgaggtagggaatgttcctggggacttaaggtatgtgcaatttgtgagccttcctctcatgtgcttcagaaacattagcaaggaggaagttgaacagaagcttatggagattagaaaccttgtgaagagctatgtgggaagaggggttgttctttacttgggtgatctaaaatggttgtttgagttctgggctaatttttgtgagcaaaaaagaaactactactgttctatagagcaaatggtcatggagcttaaaaaattggtatgtggtagtggggagtctagtagactgtggcttatggggattgcaacttttaaggcatacatgaagtgtaaaatatgtcacccatccctagaagctatttgggagcttcaccccttcacaattcctgttggcagcctcagcctaagtttaaattttcacagtgattttcaagctcaagagagaagcaaggtgtttttcaaggatgtggcttttgaagatagaacaggagtcagaaaccatctaacttgctgcagggattgcttgataaattttgaaaaagaagctcagagcataactaactgtataagtaagaaagtttgcactgctagtagcttgccaacgtggcttcaaaattgtaaggaagagagaagtgacataatggaagatcaggaaagttcaaggcttgagtatctgtgcaagaaatggaattccttatgcaattcaatacacagacgacacccttccattattgagaaaccagctgttttctttgtttcatcatccccttcatctcccacttctgtttcctcaaatgaaagaaagtccaactttcatcacagccacctaaattggccaatcatttctgaatcagaaaagtcaccaaaagaatgtgagttatacactgaaactggtgatgatgatgatgatggctatgatagcaactttataatgttcatgccagatagagatgtccctaaaccagatcttctgtcaaatccaaactctagccccaactcggcttcttcaagtgaagcagtggatggtttggaaagcactcaaatgttcaaggaacctaatgctgagaatcataagattctgtgtgatgctttggagaaaaagattccacagcataaagatgttattgttccagagattgcaagtactgtccttcattgtagatcaggaatgagaaaaagaggattaaaccacttgatgaacagagaagaaaatcaagaaacttggatgttctttcttggtgtgaattcccaagccaaagagagcatctcaagggagctagctaaagttgtttttggctcttatagcaactttgtctcaattggcatgagcaatttctcttccccagaagatgatcatgattccactgatgaaaaatccaaaaggaagaggccaagagaagagttgaaaagcagttatgttcaaagattcggggaagcagtgaatgagaaccctcatagggtgttcttcttggaagacttggatcaagttgattacttctctcaaaagggtgtaaagcaagcaattcaaagtggaagcataacactccctagtggtgaatctgttcctctcaaggatgccattgtcattttcagttgcgaaagcttctcttcaccaaagttgagaaaatcaccatgtgctgaaaacaaagggaaagagatcactgtggatgatgaaagttctagcctctctttggatctgaacctagccattgaagatgaaagtggaggtgtggcattaggtggagacaatggcatcctagagttagttgacaaacaaattaatttcaacatacaagaattgtga

SEQ ID NO: 20 - protein, 840 aa, Glycine max
  [CDS]:1..2523 from SEQ ID NO 19
MRGGICSIQLQALTPEATTVVKQAVNLATRRGHAQVTPLHVASAMLATSTGLLRKACLQCHSHPLQCKALELCFNVALNRLPASTSSPLLAPQYSTPSLSNALVAAFKRAQAHQRRGSIENQQQHILALKIEVEQLVISILDDPSVSRVMREAGFSSTLVKTRVEQAVSMEVCSQKASSDRSHAKENITKPHHVVLGDHVNNDDVTSVLSELVRRKNTVIVGEGVANAEGVAREVMERFEVGNVPGDLRYVQFVSLPLMCFRNISKEEVEQKLMEIRNLVKSYVGRGVVLYLGDLKWLFEFWANFCEQKRNYYCSIEQMVMELKKLVCGSGESSRLWLMGIATFKAYMKCKICHPSLEAIWELHPFTIPVGSLSLSLNFHSDFQAQERSKVFFKDVAFEDRTGVRNHLTCCRDCLINFEKEAQSITNCISKKVCTASSLPTWLQNCKEERSDIMEDQESSRLEYLCKKWNSLCNSIHRRHPSIIEKPAVFFVSSSPSSPTSVSSNERKSNFHHSHLNWPIISESEKSPKECELYTETGDDDDDGYDSNFIMFMPDRDVPKPDLLSNPNSSPNSASSSEAVDGLESTQMFKEPNAENHKILCDALEKKIPQHKDVIVPEIASTVLHCRSGMRKRGLNHLMNREENQETWMFFLGVNSQAKESISRELAKVVFGSYSNFVSIGMSNFSSPEDDHDSTDEKSKRKRPREELKSSYVQRFGEAVNENPHRVFFLEDLDQVDYFSQKGVKQAIQSGSITLPSGESVPLKDAIVIFSCESFSSPKLRKSPCAENKGKEITVDDESSSLSLDLNLAIEDESGGVALGGDNGILELVDKQINFNIQEL

SEQ ID NO: 21 - DNA, 2487 bp, Glycine max
  source 1..2487: /organism="Glycine max" /mol_type="unassigned DNA"
  CDS 1..2487
atgagaggaggtatttgtagcatacagcttcaggctcttacacctgaagctgcaactgttgttaagcaagctgttaatcttgcaacaagaagaggccatgcacaagtgacacctcttcatgttgcaagtgccatgcttgcaacttccacaggccttctccgcaaggcttgtcttcagtgtcactctcaccccctccagtgcaaggctcttgagctttgtttcaacgttgcactcaaccgtctaccagcttccacttcaagccctcttctggcacctcaatattccaccccttcactctccaatgccttggttgcagccttcaaacgtgctcaggctcaccaacgccgtggttctattgagaaccagcagcagcatattctggccttgaagattgaggtggagcagctcgtgatttcaattcttgatgatcctagtgttagcagggtcatgagagaagctggtttctctagcacccttgtgaaaacaagggtcgaacaagctgtttcaatggaagtttgttcacaaaaggctcaagcaaaagaaaatatcactaagcctcatcatcaacctaatttggaccatgttaacaatgatgatgtgactagtgtgttgagtgagttggcaaagagaagaaacacagttattgtaggggagagtgtgaccaatgctgagggtgtagttaggggagtgatagagaggtttgaggttgggaatgttcctggagacttgaggtatgtgcaatttgtgagccttcctctcatgtgcttcagaaacattagcaaggaggaggttgaacagaagcttatggaggttagaaaccttgtgaagagctatgtgggaggaggggttgttctttacttgggtgatctaaaatggctgtttgagttctgggctaattttcgtgagcaaaaaacaaactactgttctgtagagcacatggtcatggagcttaaaaaattggtatgtggtagtggggagtctagtagattgtggcttatggggatttcaacttttaagacatacatgaagtgtaaaatatgtcacccatccctagaaaccatttgggagcttcatcccttcacaattcctgttggcatcctcagcctaagtttaaatcttgacagtgattttcaagctcaagagagaaacaaggtatttttcaaggatgtggcttttgaagatagagcaggagtcagaaaccatctaacttgctgcagggattgcacaataaattttgaaaaagaagctcagagcataactagcactataagtaagaaagcttgcactactagtagcttgccaacgtggctccaaaattgtaaggaagagagaagtgacataatggaagatcaggaaaatgcaaggcttaaggatctgtgcaagaaatggaactcattatgcaactcaatacacagacacccttccattaatgagaaacaagttttctttgtttcatcatctccttcatctcccacttctgtttcctcacatgaaagaaagtccaactttcaccacagccacctaaattggccaatcatttctgaatcagaaaagtcaccaaaagaatgtgagttatacactgaaactggtgatgatggctatgatagcaactttataatgttcatgccagatagtgatgtccctaaaccagatcttctgtcaaatcccaactctagccccaactcagcttcttcaagcgaagcagtggatggtttggaaagcactcaaatgttcaaagaacctaatgctgagaatcataagattctgtgtgatgccttggagaaaaaggttccacagcataaagaagttattccagagattgcaagtaccgtccttcattgtagatcaggaatgagaaagagagatcagaaccactcgatgaagagagaagacaatcaagaaacatggatgttctttcttggtgtgaattctcaagccaaagagagcatctcaagagagctagctaaagttgtttttggctcttatagcaactttgtcacaattggcatgagtagtttctcttccccagaagatgatgatgattccactgatgaaaaatccaaaaggaagaggccaagagaagagttgaaaagcagttatgctcaaagattcggggaagcagtgaatgagaaccctcacagggtgttcttcttagaagacttggatcaagttgattacttttctcaaaagggtgtagagcaagcaattcaaagtggaagcataacacttcctggtggtgaatctgttcctctcatggatgccattgtcattttcagttgcgaaagcttcttctcttcaccaaagctgagaaaatcaccatgtgctgaaaacaaagggaaagagactgtggaagatgaaagttctagcctctctttggatctgaacatagccattgaagatgaaagtggaggtgtggcattcggtggagacaatggtatcctagagttagttgataaacaaattaatttcaacatacaagaatcgtga

SEQ ID NO: 22 - protein, 828 aa, Glycine max
  [CDS]:1..2487 from SEQ ID NO 21
MRGGICSIQLQALTPEAATVVKQAVNLATRRGHAQVTPLHVASAMLATSTGLLRKACLQCHSHPLQCKALELCFNVALNRLPASTSSPLLAPQYSTPSLSNALVAAFKRAQAHQRRGSIENQQQHILALKIEVEQLVISILDDPSVSRVMREAGFSSTLVKTRVEQAVSMEVCSQKAQAKENITKPHHQPNLDHVNNDDVTSVLSELAKRRNTVIVGESVTNAEGVVRGVIERFEVGNVPGDLRYVQFVSLPLMCFRNISKEEVEQKLMEVRNLVKSYVGGGVVLYLGDLKWLFEFWANFREQKTNYCSVEHMVMELKKLVCGSGESSRLWLMGISTFKTYMKCKICHPSLETIWELHPFTIPVGILSLSLNLDSDFQAQERNKVFFKDVAFEDRAGVRNHLTCCRDCTINFEKEAQSITSTISKKACTTSSLPTWLQNCKEERSDIMEDQENARLKDLCKKWNSLCNSIHRHPSINEKQVFFVSSSPSSPTSVSSHERKSNFHHSHLNWPIISESEKSPKECELYTETGDDGYDSNFIMFMPDSDVPKPDLLSNPNSSPNSASSSEAVDGLESTQMFKEPNAENHKILCDALEKKVPQHKEVIPEIASTVLHCRSGMRKRDQNHSMKREDNQETWMFFLGVNSQAKESISRELAKVVFGSYSNFVTIGMSSFSSPEDDDDSTDEKSKRKRPREELKSSYAQRFGEAVNENPHRVFFLEDLDQVDYFSQKGVEQAIQSGSITLPGGESVPLMDAIVIFSCESFFSSPKLRKSPCAENKGKETVEDESSSLSLDLNIAIEDESGGVAFGGDNGILELVDKQINFNIQES

SEQ ID NO: 23 - DNA, 2550 bp, Medicago truncatula
  source 1..2550: /organism="Medicago truncatula" /mol_type="unassigned DNA"
  CDS 1..2550
atgagaggaggaatttgtagtatacagcttcaagcacttacacaagaagctgcaactgttgttaaacaagcagtgaatctagcaacaagaagaggtcatgcacaagtgacacctcttcatgttgctagtgctatgcttgcaacttcaacaggaattttaagaaaagcttgtcttcaatgtcactctcaccctcttcaatgcaaagctcttgagctttgtttcaatgttgcactcaaccgtttacctgcatcaacacaaagtccactattaggtcctcaatattcaaccactccttcactttctaatgctttggttgcagctttcaaacgtgctcaggctcaccaacgacgtggaacgatcgagaatcagcaacagcagcatattcttgctttgaaaattgaagttgaacagctcataatctctatacttgatgatccaagtgttagtagagttatgagagaagctggtttctctagcactcttgttaaatcaagagttgaagttgaacaagctcttccaattgaagtttcttcaacaaaagtttcttctgaatatcataaaaaccagtccaaagaacttagccttaagcctcaagttcttagccttggtggttcatacaccaaacctatagattgtgttaacaatgatgatgtaacaagtgtcttgagtgaattagtaaagaggagaagaaacactgttattgtaggagagagtgtttctaatgctgagggagtagctaagggagtgatggaaaggtttgagataggtgatgttcctatggagttaaggtatgtacaatttgtgagtcttcctctaatatgttttaggaatattagtaaagaggaagttgaaaagaaatttgtggaagttagaagccttgtgaaaagctatatgggaagaggggttattctttatttaggtgatttaaaatggttgtttgagttttggtcaagttactgtgaacaaaaaaggaactactattgttctgttgaacatatggtgatggagattaaaaaattggttagtggaagtggtgagagtagtagattatggcttatggggattgcaaattttaaaacatacatgaagtgtaaaatatctcacccttccctagaaactatttgggagcttcatccttttacaattcctgttggcagcctaagcctaagtttgaactttgacagtgattttcaagctaaggagagaagtatggtattattcaatgacttgacttttgaagataaagtaggtgttggaaagcaactaacttgctgcagagattgttcaataaaatttgaaaatgaagctctgagtttgactaacaatataagcaagaaagcatgcagttcaagcttgccaacatggcttcaaaattgcaaggaagaaagaagttacacagtggaagatcaggaaaatgcaagacttaaggatctctgcaagaaatggaactcaatatgcaattcaatacacagacaaccttccattcttgacaaacaagatttgtttgttttatcatcttccccttcatcaccaacttcattttcctcacttgaaaaaaagtctaacttccaacatagccaactaaattggcctataatttctgaacaagaaaaagtaccaaaagaatgtgagttattatacactgaaagtgctggtggtgatgatgatggttgctatgatggtaacttgatcatgttcatgccacagagaaatgttccaaaaccagatcttttgtcaaatcctaactcaagtccaaactcagcttcttcaagtgaagcagtggatggtttagaaagtactgaattgttcaatgaacataatgaagagaatctcaagattctctgtgatgccttggagaacaagtttccacaacataaagaaatcattcaagagattgcaagtactgtccttttttgtagatcaggaatgagaaaaagagggaacaacttcttcaaaagagaaaatcataagcaagaaacatggatgttttttcttggtgatgattctcaagccagagagaatatctcaaaggagctagctaaagttgtttttggatcttgtaacaactttatgacaattggcatgagcactttctcttccctaggaaatgatgattcctcaagtgatgaaaaatccaaaaggaaaagaccaagagctgagttgggaagcacttatttgcagagattttgtgaggcagtgaatgagaatcctcatagagtgttcttcatggaagatttggaggaggaagttgatcactttactcaaaagggtatcaagaaagcaattgaatgtggaagtataacaattcctggtggtgaatctgttcctctcaaggatgccattgtcattttcagtagtgaaagcttcagttcagtgtcaaagtcatcacaatcatcatgtgctgaaaacaaagggaaagagaccatgatagaggatcatcaaagtaatctaaacctctctttggatctaaatatcgccattgaagatcatgataatgctgacattggtattcttgagttagttgacaagaaatttagttttaatttgtaa

SEQ ID NO: 24 - protein, 849 aa, Medicago truncatula
  [CDS]:1..2550 from SEQ ID NO 23
MRGGICSIQLQALTQEAATVVKQAVNLATRRGHAQVTPLHVASAMLATSTGILRKACLQCHSHPLQCKALELCFNVALNRLPASTQSPLLGPQYSTTPSLSNALVAAFKRAQAHQRRGTIENQQQQHILALKIEVEQLIISILDDPSVSRVMREAGFSSTLVKSRVEVEQALPIEVSSTKVSSEYHKNQSKELSLKPQVLSLGGSYTKPIDCVNNDDVTSVLSELVKRRRNTVIVGESVSNAEGVAKGVMERFEIGDVPMELRYVQFVSLPLICFRNISKEEVEKKFVEVRSLVKSYMGRGVILYLGDLKWLFEFWSSYCEQKRNYYCSVEHMVMEIKKLVSGSGESSRLWLMGIANFKTYMKCKISHPSLETIWELHPFTIPVGSLSLSLNFDSDFQAKERSMVLFNDLTFEDKVGVGKQLTCCRDCSIKFENEALSLTNNISKKACSSSLPTWLQNCKEERSYTVEDQENARLKDLCKKWNSICNSIHRQPSILDKQDLFVLSSSPSSPTSFSSLEKKSNFQHSQLNWPIISEQEKVPKECELLYTESAGGDDDGCYDGNLIMFMPQRNVPKPDLLSNPNSSPNSASSSEAVDGLESTELFNEHNEENLKILCDALENKFPQHKEIIQEIASTVLFCRSGMRKRGNNFFKRENHKQETWMFFLGDDSQARENISKELAKVVFGSCNNFMTIGMSTFSSLGNDDSSSDEKSKRKRPRAELGSTYLQRFCEAVNENPHRVFFMEDLEEEVDHFTQKGIKKAIECGSITIPGGESVPLKDAIVIFSSESFSSVSKSSQSSCAENKGKETMIEDHQSNLNLSLDLNIAIEDHDNADIGILELVDKKFSFNL

SEQ ID NO: 25 - DNA, 2634 bp, Glycine max
  source 1..2634: /organism="Glycine max" /mol_type="unassigned DNA"
  CDS 1..2634
atgagggccggggggtgcacggtgcagcaggcgctgacggcggaggcggccgccgtggtgaagcaggcggtgacccttgcgcggcggaggggcaacgcgcaggtgacgccgctgcacgtggcgagcgcgatgctggcgccgccgggggggctcctccgcgcggcgtgcctccggtcgcactcccacccgctgcagtgcaaggccctggagctctgcttcaacgtggcgctcaaccgcctcccggcctccgccgccgtcgcctcgtcgccgctgctcggcggccacgggcacggccaccacggccactactacccgccgtcgctctccaacgcgctcgtcgcggcgttcaagcgggcgcaggcgcaccagcggcgcgggtccgtggagacccagcagcagccggtgctcgccgtgaagatcgagctggagcagctcgtcgtctccatcctcgacgaccccagcgtcagccgcgtcatgcgggaggccggcttctccagcacccaggtcaaggccaacgtggagcaggcgtgcagcaccaccacggccaccagcgcgccaccgaaccaaaaccctaaccctagctgcaccggcgccgcagccaccgccaccgccaccaccagcccggctcatcctccggagatcaaagccaaactgccactgctcgacatgctggcgcgcgacgaggacatcgccgcggtgctcgactgccttgccccggcagcggctggcggccggggcggcggcggcagcaggaggagggtcgtcgtcgtcgccgagagcacggccgccgcggaggccacggcgcgcgccgccgtggacagggtcaggagaggggaggcgaagcagcacgacgcgctgcgtggcgcgcaggtggtcagcctccgcgtgtcgtcgttccgcgacatgccgagggaggaggcggagcggcggctcgccgagctccggtgcctcgtgaagagccgcggcgcgcgggtgctcctcgtcgtcgaggacctcaagtgggcggccgacttctgggccgccgcgcacgccggcgccaggagggtcggcagcggcggcggcggcggctactactgctctgtcgagcacgtcgtcaccgaggtgcgcgccctggcgtcgtgcgacggcggcatctggctcgtcgggttcgggacgtaccagacgtacatgaagtgcagggcggggcatccgtcgctggagagcatgtgggggctccagacgctcgccgtccccgccggcagcctcgcgctgagcctcacctgcgccttcgacgacagcgcgctgggcgcagtcaatcagtccatgaaagcgagccctcacaccaccgatgggaaccgcccggcgccgtcttgcgggccgcttttgggcggcagccacctcctctccagatgctgcggcggcgactgctccgccgcgacgacgacgcacgagcacgacaccaaggcgtcgttgccccgctccttcgtgtcgtcgtcgagcctcccttcttggctccagcattgccgcgaccagcagctgcaggagtcgacacatttcgcggatcttggcaagacatggggatccatctgcggcaagccgtctcagcggatgacgctgcatttctcggcgccggtgtcgccggcgtcctccatctcctcctacgagcacggccacggccaccagcagcagcagcaccagcctcaccactcgtggcttctcgccgacctcgacgccaagcacccatggaagcccaagcgcgaggacgacgacgacgagaaggccaagtcgcacgacgactgctccggcgcctccaatggctcggtggaggtggagtgccgttccaggttcaaggagctcaacgccgagaacctgaagctcctgtgcgccgcgctggagaaggaggtgccgtggcagaaggagatcgtcccggaggtggcgagcgccgtcctccagtgcaggtccgggatcgccaagcggcgggacaggtcgaggtcgacggaggcgaaggaggagacgtggctcttcttcctcggaggcgacgggcacggcaaggagagggtggcgagggagctcgccggcctcgtcttcgggtcacgcaagagcttcctctccgtcaagctcggcgcctcctcctcctcgccgtccgcgtcgggctccaccgaggatcaccaccggagcaagcggccgcggacgacgacgacgtcgtcggcgagcgaggcctacctcgagcggctctacgacgccgtctcggagaacccgcaccgcgtcatcctcatcgaggacgtcgagcagggcgaccatcgctggcaggtgggcgtcaaggaggccatcgacagaggggttctccggagccaggccggcgacgaggtcggcgtgggcgacgccatcatcatcctgagctgcgagagcttcgaggcgaggtctagagctggctcgccgctgatgaacaagaagatgaaggtggagaaagaggaagccaacacaagtgatcatgatcacaaattagaaatcgaatcaggcgccccctcttcttgcttcgatttgaaccttgacatggagagcgatcaagcagcagatgagctcagctccggtgatgtctgtctgctcacggcggtcgaccgggtgctgctcttcagaaggcaggatgaaatgtaa

SEQ ID NO: 26 - protein, 877 aa, Glycine max
  [CDS]:1..2634 from SEQ ID NO 25
MRAGGCTVQQALTAEAAAVVKQAVTLARRRGNAQVTPLHVASAMLAPPGGLLRAACLRSHSHPLQCKALELCFNVALNRLPASAAVASSPLLGGHGHGHHGHYYPPSLSNALVAAFKRAQAHQRRGSVETQQQPVLAVKIELEQLVVSILDDPSVSRVMREAGFSSTQVKANVEQACSTTTATSAPPNQNPNPSCTGAAATATATTSPAHPPEIKAKLPLLDMLARDEDIAAVLDCLAPAAAGGRGGGGSRRRVVVVAESTAAAEATARAAVDRVRRGEAKQHDALRGAQVVSLRVSSFRDMPREEAERRLAELRCLVKSRGARVLLVVEDLKWAADFWAAAHAGARRVGSGGGGGYYCSVEHVVTEVRALASCDGGIWLVGFGTYQTYMKCRAGHPSLESMWGLQTLAVPAGSLALSLTCAFDDSALGAVNQSMKASPHTTDGNRPAPSCGPLLGGSHLLSRCCGGDCSAATTTHEHDTKASLPRSFVSSSSLPSWLQHCRDQQLQESTHFADLGKTWGSICGKPSQRMTLHFSAPVSPASSISSYEHGHGHQQQQHQPHHSWLLADLDAKHPWKPKREDDDDEKAKSHDDCSGASNGSVEVECRSRFKELNAENLKLLCAALEKEVPWQKEIVPEVASAVLQCRSGIAKRRDRSRSTEAKEETWLFFLGGDGHGKERVARELAGLVFGSRKSFLSVKLGASSSSPSASGSTEDHHRSKRPRTTTTSSASEAYLERLYDAVSENPHRVILIEDVEQGDHRWQVGVKEAIDRGVLRSQAGDEVGVGDAIIILSCESFEARSRAGSPLMNKKMKVEKEEANTSDHDHKLEIESGAPSSCFDLNLDMESDQAADELSSGDVCLLTAVDRVLLFRRQDEM

SEQ ID NO: 27 - DNA, 2538 bp, Oryza sativa
  source 1..2538: /organism="Oryza sativa" /mol_type="unassigned DNA"
  CDS 1..2538
atgcgtgccggcggctgcgcggtgcagcaggcgctggcggcggaggcggcgggggtggtgaggcaggcggtgacgctggcgcggcggcgcggccacgcgcaggtcacgccgctccacgtcgccagcgccatgctctccgccgccggcctcctccgcgccgcctgcctccagtcccactcccacccgctccagtgcaaggccctcgagctctgcttcaacgtcgccctcaaccgcctccccaccgccggccccgccgccgccgcggccatcttccaccaccacccacaccaccccggcggcggcggcggtcaccaccccgcgctgtcgaacgcgctcgtcgccgcgttcaagcgcgcccaggcgcaccagcggcgtgggtccgtcgagggacagccgccgccgcagccgccgccgtcgccggtggtcgcgtccaaggtcgagctcgagcagctcatcatctccatcctcgatgaccccagcgtcagccgcgtcatgcgcgaggccggcttctccagctcgcaggtcaaggccaacgtcgagaaggccgtcgtcgcgtcgttggaccacgcgaacgcggcaggcggcggcggcggccacgcgggctctcccaactccggccatggagggaggcgcaaggagagctcatcatccagagcaagggtcgacgacgacgccatgcgcgtgctggactgcatggcgagcgggacgaaacggtgcgtggtggtcgtcggcggcgagggcgcggccgcggcggaggcggtggtgaaggcggtgatggacagggtgagcaaggcggagctgcaccaccggcacgagcgcctcaagaacctccagttcgtgcccctctccatcgcgtcgttccacggcgcgccgagggaggaggtggaggccaaggccagcgacctccgcgcgctcgtccgctccggctgcgccgccggcaagggcgtcgtgctcgtcctcgaggacctcgcctacgccgccgacgcgtgggccgccgcgtcgaacaccagacgccgcgccgccgccgccgccggcgggcagagctactgccccatggaacacgccgtgatggaggtgagcagcttggtgtccggcggcggcggcggcggcgagaggttctgggtgctagggttcgggagctaccaggtgtacatgaagtgcagggccgccgggcagccgccgctcgaggccgtctgggagctccaccccgtcgtcgtccccgacggcggcctcgccttgagcctcacctgcagtgaagcttcacaagctactcatcaagcggcggcgccaacagctgggtggcccttcgtcaatggcgccggcgaggcggcggcgacgacggcgagcccgaccattccgccgtggcttcgccggtatcaagatccagatcacgccacgccggcgagctgcggcaccggtttgcagatacaagatctgtggaatcccatgagaaatggatcagcaccacaccacacatccgagcttacattgagtttctcctctccatcaccttcttccatctcaggatataccagctgctacaacaacaacaacatgatgagctccaagccatggcaactcgaagcgaggcagccatggccaattcatggacatgaaggtcagagaatggccatggcatcatatcatgatcatcatccgttggatacaaaccctagcccagagtccaactcggtgtccaattcattggatggcggtgagacgaggcggcccaagttcatcgagctcaatgcagagaacctcaagatcttgtgcaatgcgctcgagagccgcgtcccgcaacatagcaacattgttccagacattgcgagcaccgtgctccaatgtcgatccggcatgaagaagatgaagttgaggcataaggagatcatcaaggcaagctcaactacttggttactattccaaggaagagatgttgatggtaagaaggccatggcacaagagctcgcaaagcttgtctttggttcatctaccgagttctcttccatctccttcgatgagctcacatcgccctactccgattctagctccggtgagctcaccctcaagaggcaaagatcagcagacagcaatgagcatagctttgcgcagagactatgtgaaattgtgagcaaaaacccacaccaggtcatagtgatcaatgacattgagcaacttgatcaagattcagaaattagtatcaagaaagcgattgcgaacggaagaatgagaggatgcaccggtgaagaagttgatttcgaggatgctatcatagtgttgagctatgaagaagaattcgattcgaggtctagggcttcctcctcccctcgggtcaagcagaggctcatgaacaataatgatgatgaagaaagtagcagcacggagaagggagataattcaccacaacgttttagcttggatttgaatgcatgtctcgaggatgaagaagaggatgaggggtttttgctaattgataatggtgtggggatgcatgatattgtggatggtgttttcttcttcgggttgatggcagatttctga

SEQ ID NO: 28 - protein, 845 aa, Oryza sativa
  [CDS]:1..2538 from SEQ ID NO 27
MRAGGCAVQQALAAEAAGVVRQAVTLARRRGHAQVTPLHVASAMLSAAGLLRAACLQSHSHPLQCKALELCFNVALNRLPTAGPAAAAAIFHHHPHHPGGGGGHHPALSNALVAAFKRAQAHQRRGSVEGQPPPQPPPSPVVASKVELEQLIISILDDPSVSRVMREAGFSSSQVKANVEKAVVASLDHANAAGGGGGHAGSPNSGHGGRRKESSSSRARVDDDAMRVLDCMASGTKRCVVVVGGEGAAAAEAVVKAVMDRVSKAELHHRHERLKNLQFVPLSIASFHGAPREEVEAKASDLRALVRSGCAAGKGVVLVLEDLAYAADAWAAASNTRRRAAAAAGGQSYCPMEHAVMEVSSLVSGGGGGGERFWVLGFGSYQVYMKCRAAGQPPLEAVWELHPVVVPDGGLALSLTCSEASQATHQAAAPTAGWPFVNGAGEAAATTASPTIPPWLRRYQDPDHATPASCGTGLQIQDLWNPMRNGSAPHHTSELTLSFSSPSPSSISGYTSCYNNNNMMSSKPWQLEARQPWPIHGHEGQRMAMASYHDHHPLDTNPSPESNSVSNSLDGGETRRPKFIELNAENLKILCNALESRVPQHSNIVPDIASTVLQCRSGMKKMKLRHKEIIKASSTTWLLFQGRDVDGKKAMAQELAKLVFGSSTEFSSISFDELTSPYSDSSSGELTLKRQRSADSNEHSFAQRLCEIVSKNPHQVIVINDIEQLDQDSEISIKKAIANGRMRGCTGEEVDFEDAIIVLSYEEEFDSRSRASSSPRVKQRLMNNNDDEESSSTEKGDNSPQRFSLDLNACLEDEEEDEGFLLIDNGVGMHDIVDGVFFFGLMADF

SEQ ID NO: 29 - DNA, 2529 bp, Populus trichocarpa
  source 1..2529: /organism="Populus trichocarpa" /mol_type="unassigned DNA"
  CDS 1..2529
atgagagcaggaggttgtacagtgcaacaagctctgacggcagacgcagcaagtgttattaaacaagcagtaacccttgctagaaggcgaggccatgcccaagtcactcctctccatgttgctaacaccatgctttctgcctccactggcctatttagaacagcttgccttcagtcacactctcatcctcttcagtgcaaagccctagagctttgcttcaacgtcgcgcttaatcggctcccagcttcaacttcaagccccatattaggtactcactctcagcagttcccttcaatctctaatgccttggtagcagcttttaagcgcgctcaggctcaccaacggcgtggctctattgaaaaccagcagcagccactccttgcagtgaaaatagagttagagcagctcataatatccattttagacgatcctagtgttagtagagtcatgagagaagctggtttctctagtactcaagtgaaaagcaatgttgagcaagctgtttctttagaaatatgttcacaaagtgctccttctgtgagtagcaagtccaaggaaagcaatggtttggtcctttcacagtctccaacttcaagtcaagttggagcaaaagcaacagttttagatccaattaaaaacgaagatgtgatgtgtgtcatagagaatttagtgaacaaaaggaggagaagttttgttattgttggagagtctctggccagtatagaagttgtggtgaaaggagtcattgataaggttcaaaagggagatgttcctgaggctttgagggaagtgaagtttttaacaatcccagtttcttcttttggccatttctctagggtagaggtagaacataaactcgaagagcttaaaatccatgtgagaagctacatgggcaaaggagttgttttgaatttgggagatctcaaatgggctattgagaatagggctagtagttcatcaagtgagcaaggaaggtgctttttctgtccaatggaatacatgatcatagagcttggcaaattagcttgtggaattggagagaatattaatggaagattttggcttatggggattgccactttccaaacttacatgaagtgtaaatcaggccatccatcaggaggtactgttttgggcctccatccacttacaattcctgcaggcagcttgcgcttgagtctcatcagtgacagtgatctacgatgtcagtccacaagaaacaaagctggaaatgggtctagcagctggattctacatgaaggtggggaagataaacagctcacttgctgtgctgattgttcagccaagtttgagtcagaagctcgaagcttaccaactagcacctgtgacagtgattccacaacttctggccttcctgcatggcttcaacaatgcaaaaatgagaaaaacttacaaaatagtgataatcagaactctatgtcaatcaaagatctttgcagaaaatggaactcattttgcagttcaatccaccgacaacactacttttctgagaaaaccctcacattttcttctgtatcaccttcttcttctacttcatatgaccagcaataccctatttttcaacaaacccacaatgagtggcccattgttgaacccaagcatttgagaatgtacattccagaacataaagatcataccaaacaattaccattttcatcaaatcctaattctactccaaactcaacttcatcaagtgatgtcatggaagtggtgtatctccacaagttcaaggagctaaatgctgagaacttgaaaatcctatccattgcattggagaaaaaagtgccatggcagagagatataatccctgaaatagcaagcactatcttgcaatgccggtctggcatgataagaagaaaggggaagatgaaaaacagtgaatccaaagaagaaacttggttgttttttcaaggagttgatgtggaagctaaagagaagatagctaaagaattggccaggctagtttttggctccaatgacagcttcatttcagtttctttaagcagtttttcttctacaagagcagactcgaccgaagattgtagaaataaaagatcaagagatgaacaaagttgcagctatatcgagagattttctgaggcagcatcaaacaatccacgtagagttttcttagtggaagacgttgagcaagcagattattgctctcaaattggtttcaaaagagctattgaaagtggaagaataaccaattccaatggtcaagaagttggccttagtgatgctatcatcattttgagctgtgaaagcttcagctcaagatctagagcctgctctcctccaatcaagcagagaacagatgggtcttatgaagaagaagacaatgctggtgccggtgctgcattaatggaggacacaaccccttgcatatccctggatttgaatatttccgttgacgatgataacatattggaagatcaatcgattgatgacattggcctccttgaatccgtcgatagacggattatattcaaaattcaagagttttga

SEQ ID NO: 30 - protein, 842 aa, Populus trichocarpa
  [CDS]:1..2529 from SEQ ID NO 29
MRAGGCTVQQALTADAASVIKQAVTLARRRGHAQVTPLHVANTMLSASTGLFRTACLQSHSHPLQCKALELCFNVALNRLPASTSSPILGTHSQQFPSISNALVAAFKRAQAHQRRGSIENQQQPLLAVKIELEQLIISILDDPSVSRVMREAGFSSTQVKSNVEQAVSLEICSQSAPSVSSKSKESNGLVLSQSPTSSQVGAKATVLDPIKNEDVMCVIENLVNKRRRSFVIVGESLASIEVVVKGVIDKVQKGDVPEALREVKFLTIPVSSFGHFSRVEVEHKLEELKIHVRSYMGKGVVLNLGDLKWAIENRASSSSSEQGRCFFCPMEYMIIELGKLACGIGENINGRFWLMGIATFQTYMKCKSGHPSGGTVLGLHPLTIPAGSLRLSLISDSDLRCQSTRNKAGNGSSSWILHEGGEDKQLTCCADCSAKFESEARSLPTSTCDSDSTTSGLPAWLQQCKNEKNLQNSDNQNSMSIKDLCRKWNSFCSSIHRQHYFSEKTLTFSSVSPSSSTSYDQQYPIFQQTHNEWPIVEPKHLRMYIPEHKDHTKQLPFSSNPNSTPNSTSSSDVMEVVYLHKFKELNAENLKILSIALEKKVPWQRDIIPEIASTILQCRSGMIRRKGKMKNSESKEETWLFFQGVDVEAKEKIAKELARLVFGSNDSFISVSLSSFSSTRADSTEDCRNKRSRDEQSCSYIERFSEAASNNPRRVFLVEDVEQADYCSQIGFKRAIESGRITNSNGQEVGLSDAIIILSCESFSSRSRACSPPIKQRTDGSYEEEDNAGAGAALMEDTTPCISLDLNISVDDDNILEDQSIDDIGLLESVDRRIIFKIQEF

SEQ ID NO: 31 - DNA, 2565 bp, Populus trichocarpa
  source 1..2565: /organism="Populus trichocarpa" /mol_type="unassigned DNA"
  CDS 1..2565
atgagggctggaatttgcagtgtacagcaggctcttactcccgaggctgttagtttagtgaaacaagcagttggtcttgctaggcggcgaggccatgctcaagtcactcctcttcatgtagcaagcacaatgcttgcttcctctactggtcttctcagaagggcttgccttcaatcccactctcatcctcttcaatgcaaagctctggagctctgcttcaatgtggcgcttaatcgcctccctgcgtccacttctagtgccctattaggccctcactcctcatacccttccctctccaatgccttggttgcggcctttaagcgtgctcaggctcaccaacggcgagggtccatcgaaaaccagcaacagcccattttagctttgaaaattgagatagaacagctcattatctctatcctagatgatcctagtgttagtagagtcatgaaggaggctggtttctctagtactcaagtgaaaaacaaggtagaacaaactgtttctttggagatttgtcctcaaagttctcttactgtcagctgtcagcccaaagaaatcatcaaacctcaagttcttagcgctagtgtgtctcaatctctacctttcagtcagtttggaatcatacacagcaaaccattagatcaagtaaggaatgatgatgtaatgagtgtcttaaacacattggtgggcaaaaaaagaaacactatcatcacaggagagtgcctggctactgctgagagcgtagttaggggggtgatggacaagtttgagagaggggaggtttctggggatttgaggtctgtgaggttcaaaaaccttcctcttttctctttcagaagtctttccaaagaggaccttgaacagaagcttatggagcttaggtgtattgtgaagagctatataagcactggggtggttttatatctgggtgatctcaaatggatagctgatttttggtcaagctatggtgagcaaaggagaagctactactgcactgcagatcacataatcttggagctcaaaagattagttcatggattcagtgaaacgggaaggttgtggcttatggggatcgctactttccaaacttacatgaagtgtaaagcaggccacccttctctagagactatgtgggaacttaatcctgtaacaattccagttgggagcctgaacctaagtctcaaactcgatagtgattcacaatctcatcaatccagaagcaaggcatctttgaatgggtccagttggccactgcttgaatctagagttgataaccacttaacttgctggacagattactctgtcaacttcaataaagaagctcaaagcctagtaggtaggacccataacaaggaatccacttctagcgttactatttccaacaattcaagcttgccgttatggctccagcagtgcaaagaaactgaaagaaatacaaccaatgaccaggaatatctatgcaataaagggatttctctttttggttcagtccacaaacagtcctattatcctgagaaaaccatcaaatttgcttcgtctcctccttcaccgaattcattctcctcgcaagagcgcaacaccgacccacaacagacacacctaagttggccagtgatttttgaacataaacagtttgaaaaggagaaccagatttggatttcagaatgcagcaatgaaggttatgaaagcagtttgagaaatgttcccaaacccgaccttttgtcaaatcccaactctagtccaaattcagcttcttcaagtgaggcaatggatgatattgagggtgtccaaagcttcaaggagttcaatgactacagcttgaagaatctacgtagtggcttggagaagaaggttccatggcagaaggatatcattcctgaaattgcaaccactatccttgagtgcaggtctggaatgaggaaaaggaaaggaaagttgaatcacatagaagacaaagcagaaacttggctgtttttcttaggtgttgattttgaaggtaaagaaaagattgcaagggagctagctaaactagtttttggctctcaaagcaactttgtatcgattggtttaagcaatttctcctcatcaagagctgattctatcgaagaatccaaaaacaagagggcaagagatgagttgggttgcagttatcttgagagacttggcctagctttgaatgaaaatcctcatcgcgtgttcttcatggaagatgtggatcaagttgacaactgttctcaaaagggtatcaagcaagcaattgaaaatggaaatgtaacacttcctgatggtgaaaaagtccctcttaaggatgccattattattttcagctgtgaaagcttctgttcggtgtccagaacatgttctcctccaagaaggcaaaaaaccggtgacaatcatgaagacaaggaagatgaggatgtcatggaggagaaaagtctagttctttcacttgacctgaatatttcctttggcgataatggagatgatcaatgttcacttgcagaatatgggattttagaatctgtggataggcaggttgttttcaaaattcaagaattaagttag

SEQ ID NO: 32 - protein, 854 aa, Populus trichocarpa
  [CDS]:1..2565 from SEQ ID NO 31
MRAGICSVQQALTPEAVSLVKQAVGLARRRGHAQVTPLHVASTMLASSTGLLRRACLQSHSHPLQCKALELCFNVALNRLPASTSSALLGPHSSYPSLSNALVAAFKRAQAHQRRGSIENQQQPILALKIEIEQLIISILDDPSVSRVMKEAGFSSTQVKNKVEQTVSLEICPQSSLTVSCQPKEIIKPQVLSASVSQSLPFSQFGIIHSKPLDQVRNDDVMSVLNTLVGKKRNTIITGECLATAESVVRGVMDKFERGEVSGDLRSVRFKNLPLFSFRSLSKEDLEQKLMELRCIVKSYISTGVVLYLGDLKWIADFWSSYGEQRRSYYCTADHIILELKRLVHGFSETGRLWLMGIATFQTYMKCKAGHPSLETMWELNPVTIPVGSLNLSLKLDSDSQSHQSRSKASLNGSSWPLLESRVDNHLTCWTDYSVNFNKEAQSLVGRTHNKESTSSVTISNNSSLPLWLQQCKETERNTTNDQEYLCNKGISLFGSVHKQSYYPEKTIKFASSPPSPNSFSSQERNTDPQQTHLSWPVIFEHKQFEKENQIWISECSNEGYESSLRNVPKPDLLSNPNSSPNSASSSEAMDDIEGVQSFKEFNDYSLKNLRSGLEKKVPWQKDIIPEIATTILECRSGMRKRKGKLNHIEDKAETWLFFLGVDFEGKEKIARELAKLVFGSQSNFVSIGLSNFSSSRADSIEESKNKRARDELGCSYLERLGLALNENPHRVFFMEDVDQVDNCSQKGIKQAIENGNVTLPDGEKVPLKDAIIIFSCESFCSVSRTCSPPRRQKTGDNHEDKEDEDVMEEKSLVLSLDLNISFGDNGDDQCSLAEYGILESVDRQVVFKIQELS

SEQ ID NO: 33 - DNA, 2583 bp, Populus trichocarpa
  source 1..2583: /organism="Populus trichocarpa" /mol_type="unassigned DNA"
  CDS 1..2583
atgagagcaggaggttgcacagtgcaacaagctctaacagcagaggcagcaagtgttattaaacaagcagtaactcttgctagaaggagaggccatgcccaagtcactcctctccatgttgctaataccatgctttctgcctccactggcctactgagaacagcttgccttcagtcacactctcaccctcttcagtgcaaagccctagagctttgcttcaatgtcgcgcttaatcgtctcccaacatcaacttcaagccccatgataggtactccctctcaacagttcccttcaatctctaatgccttggtcgcagcctttaagcgcgctcaggctcaccagcggcgtggctctattgagaaccagcagcaacctctccttgcagtgaagatagagttagagcagctgatgatatccattttagatgatcctagtgttagtagagtcatgagagaagctggtttctccagtactcaagtgaaaagcaatgttgaggaagctgtttccctagaaatatgttcacaaagtgttccttctgtgagtatcaagtccaacgaaagcaatggtttagtccatccagagtctccaccttggagtcaagttggagcaaaagcagcagttttagatccaattaaaaatgaagatgtgatgtgtgttatagagaatttaatgaataaaaggaggagaagttttgttattgtaggggaatctctggcaagcattgaagttgtagttaaaggagtcaaggacaaagttcaaaagggagatgttcctgagggcttgagggaagtgaagttcttaccaattccagtttcctcttttggcagtttctctagggtagaggtagaacataaacttgaggagcttaaaggccatgtgagaagctacatgggcaaaggagtggttttgaatttgggagatcttaaatgggctattgagaatagggatactagttcatcaagtcatgagcaagggagctgctatttctgtccattggtatacctgatcgtagaacttggcaaatttgcttgtgcaattggagataacaacggaagattttggcttatggggattgccactttccaaacttacatgaagtataaatcagaccatccaccgggagatactgttttgggtctccatccacttacaattccagccggcagcttacgcttgagtctcatcagtgacagtgatctactacgtcagtcgacaagcaacaaagctgaaaatgggtgtagaagctggattatacttgaaggtggggaggacaaacaactcacttcttgttctaattattcagcaaagtttgagactgaagctcgacgcttaccaaatagtacctgtaatagtgactcaacttctacacttcctgcatggcttcaaaaatacaaaaatgagaaaaaagtacaaaatagtgataatcaggattctatgccaatcaaagatctttgcagaaaatggaactcattttgcggttcaatccaccaacaaaactactcttctgaggaaaccctcacgttttcttctgtatcaccttcttcttccacttcatatgaccatcaataccctaatttgtaccgaaaccaaaatgaatggcccattgttgaaccccagcagtcatctagggacaaccatttctggatcggtacagaggctatcaacaagtgcagcattgaaccaagtttgaggaagtacattccagagcataaagatcataccaaacaactaccattttcatcaaatactaattctactccgaactcagcttcctcaagtgatgtcatggaaatggagcatctccacaagttcaaggagctgaatgctgagaacttgaaaaccctatgcaatgcattggagaaaaaagtgccgtggcagaaagatataatccctgaaatagcaagcactatcttgcaatgccggtctggcatggcaagaagaaaggggaaggtaaaaaacagtgtggccaaggaagaaacttggttgttctttcaaggagtagatatggaagataaagagaagatagctaaagaattggctaggctagtttttggctcccatgaaagcttcatttcgatttctttaagcagtttttcctctacaagagcagactccaccgaagattgtagaaacaaaagaacaagagatgaacaaagttgcagctacatcgagagattttctgacgcggtatcaagcaatccacatagagttttcttagtggaagatgtcgagcaagcagattttttctctcaaattcgtttcaaaagggctattgaaaaaggaagaataaccaattacaatggtcaagaagttggccttagtgatgctatcataattttgagctgtgaaagctttagctcaagatccagagcctgctctcctccaatcaagcagagaacagatgggtcacatgaagaagagaacagcgctggtgctacattaatggagggcacaagcccttgtgtttctctggatttgaatatttccattgacgatgatagcgtggaagatcagtcaatcgatgacattggccttcttgaatccgttgatagacggattatcttcaaaattcaagacttttga

SEQ ID NO: 34 - protein, 860 aa, Populus trichocarpa
  [CDS]:1..2583 from SEQ ID NO 33
MRAGGCTVQQALTAEAASVIKQAVTLARRRGHAQVTPLHVANTMLSASTGLLRTACLQSHSHPLQCKALELCFNVALNRLPTSTSSPMIGTPSQQFPSISNALVAAFKRAQAHQRRGSIENQQQPLLAVKIELEQLMISILDDPSVSRVMREAGFSSTQVKSNVEEAVSLEICSQSVPSVSIKSNESNGLVHPESPPWSQVGAKAAVLDPIKNEDVMCVIENLMNKRRRSFVIVGESLASIEVVVKGVKDKVQKGDVPEGLREVKFLPIPVSSFGSFSRVEVEHKLEELKGHVRSYMGKGVVLNLGDLKWAIENRDTSSSSHEQGSCYFCPLVYLIVELGKFACAIGDNNGRFWLMGIATFQTYMKYKSDHPPGDTVLGLHPLTIPAGSLRLSLISDSDLLRQSTSNKAENGCRSWIILEGGEDKQLTSCSNYSAKFETEARRLPNSTCNSDSTSTLPAWLQKYKNEKKVQNSDNQDSMPIKDLCRKWNSFCGSIHQQNYSSEETLTFSSVSPSSSTSYDHQYPNLYRNQNEWPIVEPQQSSRDNHFWIGTEAINKCSIEPSLRKYIPEHKDHTKQLPFSSNTNSTPNSASSSDVMEMEHLHKFKELNAENLKTLCNALEKKVPWQKDIIPEIASTILQCRSGMARRKGKVKNSVAKEETWLFFQGVDMEDKEKIAKELARLVFGSHESFISISLSSFSSTRADSTEDCRNKRTRDEQSCSYIERFSDAVSSNPHRVFLVEDVEQADFFSQIRFKRAIEKGRITNYNGQEVGLSDAIIILSCESFSSRSRACSPPIKQRTDGSHEEENSAGATLMEGTSPCVSLDLNISIDDDSVEDQSIDDIGLLESVDRRIIFKIQDF

SEQ ID NO: 35 - DNA, 2643 bp, Sorghum bicolor
  source 1..2643: /organism="Sorghum bicolor" /mol_type="unassigned DNA"
  CDS 1..2643
atgagagccgggggctgcacggtgcagcaggcgctggcgccggaggcggcggcggtggtgaagcaggcggtgagcctggcgcggcgccgcgggaacgcacaggtgacgccgctgcacgtggccagcgccatgctgcaccagcaggtagtggcggcggccacgggcacgggcacggggccgtcgtcgtcgacggcggcggggctgctgcgcgccgcgtgcctgcagtcgcactcgcacccgctacagtgcaaggcgctggagctctgcttcaacgtcgcgctcaaccgcctgccggcctcggcctcgccgctcctcggcgggcacggccacgtctactacccgccgtcgctctccaacgcgctcgtcgccgccttcaagcgcgcgcaggcgcaccagcgccgggggtccgtcgacacgcagcagcagcccgtgctcgccgtcaagatcgagctggagcagctcgtcatctccatcctcgatgaccccagcgtcagccgcgtcatgcgcgaggccggcttctccagcacccaggtgaaggccaacgtcgagcaggccgtctcttccatcgaagcaaacaactcggcctctaccaacaccgccgccgccgcgcaccaaaaccctaaccctagggcagctccacacgaagagactatgcctagtaagctgcagctacccctcgacctcgaccaagtgcgcgacgaggacgtcgccgtcgtcctggactgcctggcgtcccggagcaagaaacgcgtcatggtcgtcgccgagtgcgcggccacggccgaggcgccgacgcgggcggcggtcgagaagatcaagcgcggcgaggcgctgcgcggcgcgcaagtggtcagcctcagagtgtccaggttccgcgacctgccgagggacgaggcggagaggctgctcgtggagctccggtgcgcggtgaaggtgggcggcagggcgggcggcgtggtgctggtggtggaggacctcgggtgggcggccgagttctgggccgcgcgcgccgagtccgggagggccaggtggccgtcgagctgctgctactactgcgccgtcgagcacgccgtcgcggaggtgcgcgccctggcgtgccgcggcggcgacggcgtgtggctcatcggctacgggacgtaccagagctacatgaggtgcagggccgggcagccctcgctggagactctctgggggctccagacgctcgccgtccccgctggtagcctcgccttgagcctcaacttcgtcggcgacagtgcaactgcaatgacaatcaatcacctggccaagtgcgacgacgacagaagtgggaacaacgggtcggcgccacgttgcctgtcacttttggacgccggtggttccggccacctgacggccgtctccagcttcttcgccgacgactgctccgcaaccgcaaccaagtgcgagccggcgctgaagtcgagtatccctccttggcttcagcattgccgggatcaggatccttcccgttgtaagaaaagctcgacatgcggtggctcgctgtctcatcatcaccggacggccctaaatttctccacggcggtggtgtcgccgtcctcctcggtctcgtcgtatgagcagcactaccacctgcaccagccgtcgtaccagccatgggtcgtcgtcgctgacgcccacgaggacaaccacccgtctaacaaggccaggtgcgctgcggcggccgttcagctacacgtcgtcgacgatgaggacgtgaagcttctgagcgccgcgataaaggtcaagtccgacgactcgagcgcgtccaataatagctcggtggagtgccgctcccggttcaaggagctcagcgccgagaaccttaaggtcctctgctccgcgctggagaaagaggtgccatggcaggcggagatcgtgcctgagatcgcgagcacggtcctgcagtgccgttccggcatggcgaggaggcgcgacgccgctgcttcgagttcgagaccgccggcgttcgccaaggaggacacttggatgctcttccacggtggcgacgccgacggcaaggtgagggtggccagggagctggcccgcctcgtcttcggctcgcgcaagagcttcgtatccatcgccggcagcggcaccaccgcgtcgtctccggcgcggtccgacgactcttccaagcagcaacgcaagcggccccggttgatggaggaggcgagcgaccacggctgtcacgagagcctctacgaggctgtacgcgacaacccgcaccgcgtcatcctggtacaggacgtcgagcagggtggctggcggtgccagagggacattttggaggccatccaaagaggcttggtccggagccatgccggcggcgacgaggcagcgctcggcgacgccatcgtcgttctgagctgccagagctttgacgcgtggtcgacaacctcctcgccaccaacgacgaccaagaaggcgaagacagagagcgaggaggagccgacaggggaagagagcgccgcggctgcatcgccgtcgtcttcaccttgctttgatctgaacatggacgttgagaacgatgacttgctggagagttgcttcaccgatgctagtctgctcaaggcagtggatcggacgttcttctttagacgacccgatgagaggagtgattag

SEQ ID NO: 36 - protein, 880 aa, Sorghum bicolor
  [CDS]:1..2643 from SEQ ID NO 35
MRAGGCTVQQALAPEAAAVVKQAVSLARRRGNAQVTPLHVASAMLHQQVVAAATGTGTGPSSSTAAGLLRAACLQSHSHPLQCKALELCFNVALNRLPASASPLLGGHGHVYYPPSLSNALVAAFKRAQAHQRRGSVDTQQQPVLAVKIELEQLVISILDDPSVSRVMREAGFSSTQVKANVEQAVSSIEANNSASTNTAAAAHQNPNPRAAPHEETMPSKLQLPLDLDQVRDEDVAVVLDCLASRSKKRVMVVAECAATAEAPTRAAVEKIKRGEALRGAQVVSLRVSRFRDLPRDEAERLLVELRCAVKVGGRAGGVVLVVEDLGWAAEFWAARAESGRARWPSSCCYYCAVEHAVAEVRALACRGGDGVWLIGYGTYQSYMRCRAGQPSLETLWGLQTLAVPAGSLALSLNFVGDSATAMTINHLAKCDDDRSGNNGSAPRCLSLLDAGGSGHLTAVSSFFADDCSATATKCEPALKSSIPPWLQHCRDQDPSRCKKSSTCGGSLSHHHRTALNFSTAVVSPSSSVSSYEQHYHLHQPSYQPWVVVADAHEDNHPSNKARCAAAAVQLHVVDDEDVKLLSAAIKVKSDDSSASNNSSVECRSRFKELSAENLKVLCSALEKEVPWQAEIVPEIASTVLQCRSGMARRRDAAASSSRPPAFAKEDTWMLFHGGDADGKVRVARELARLVFGSRKSFVSIAGSGTTASSPARSDDSSKQQRKRPRLMEEASDHGCHESLYEAVRDNPHRVILVQDVEQGGWRCQRDILEAIQRGLVRSHAGGDEAALGDAIVVLSCQSFDAWSTTSSPPTTTKKAKTESEEEPTGEESAAAASPSSSPCFDLNMDVENDDLLESCFTDASLLKAVDRTFFFRRPDERSD

SEQ ID NO: 37 - DNA, 2652 bp, Sorghum bicolor
  source 1..2652: /organism="Sorghum bicolor" /mol_type="unassigned DNA"
  CDS 1..2652
atgcgagccggcggctgcgcggtgcagcaggcgctggcggcggaggcggcggccgtggtgcggcaggccgtggccctggcccggaggcgcggccacgcgcaggtgacaccgctccacgtcgccagcgccatgctctcggcggcggggctcctccgcgccgcctgcctccgctcccactcccacccgctgcagtgcaaggcgctcgagctctgcttcaacgtcgcgctcaaccgcctccccaccgcaggccccgccgccgccgccgtcatgttccacccccaccatcaccaccaccacgccgggcacgggcagcagcacgccgtgcccgtgctgtccaacgcgctcgtcgccgcgttcaagcgcgcgcaggcgcaccagcgccgtggcgtcgtggaaggagtgcagggacagggacagggacaggcacccgcgcagccgccgccgcagccggtgctcgccgccaaggtcgacatcgagcagctcatcatctccatcctcgacgaccctagcgtgagccgcgtcatgcgcgaggccggcttctccagctcccaggtcaaggccaacgtcgagaaggccgtctcgctctcgtcgtcgtcgtcgttacccgaccatcaaccgaacacgacgataccacccagcggcgcccacgcgacgggctctcctgcagcaggcggctccggtcacgcgagcagcaggcgccccaacgccggcggcaacaaggccgacgacgacgacgccatgcgcgtgctcgactgcatggcgagcgggaccaagcggtgcgtggtggtcgtcggcgagagcgcggccaccgcggaggtggtggtgaagtcggtgatggacagggtcagcaaaggggagctccagcagcggcacgagcggctcaagaacgtccagttcgtgcccctctcggccgcgtccttccagcggatgccgagggaggaggtggaggccaaggccggcgacctgcgcgcgctcgttcgacagggctgcgccgccgggaagggcgtcgtgctcgtcctcgaggacctcgcgttcgccgccgacgcctgggccgccgtgtcggagaggagaaggcacggcagtgttggtcgtgaacacggtcagtgcggctactgccccgtcgagcacgccgtcatggaagtgggcagcttggtgtccgccgccgccggtggcggtggcggtggcagaggcctcgacaggttctggctgctagggttcgggaacaaccaggcttacatgaagtccagagcagggcagccatctcttgaggccgtctgggagctgcaccccgtcgtcgtgccggacggcggcctctcgttgagcctcacctgcaacagtgacgctgaacaagctaatcaagatagagcaacaaggccttggccctccttcgttaacggcactgctagcggcgagagtgagctcatcacttcctccaccaaagtggcggcgacaactccgagtgtgccgccatggtttcgggggtaccaagttcaagatatgacaagaccagcaagccgcagcgccagttttcagttgcaagattggaaccacaattttaatggatcaccagcataccacacgtcggagctcacactgagcttctcctcacaggctactaactctccagacgcttcttccatctccagctcctttgccccaagcttcagtgctgccagcttgatgatgagctccgagccatggcaattcaaggtgatgcaaccttgcccaaactatcgacgtgatgatccaaacgcattggtcaggacctatgatcatcaacaattgcatggaaggcctagtccagaaaaatcctactcggtgtccaactcatctgaaggtgccccagctgagtcgccaaagttcacggagctcaccgctgagaatctcaagatcctctgcaacgcgcttgagaatcgggctccacatcacaaggacgtggctacagagattgcaagtgttgtgctccagtgccgctcgggcatgacaaggaggaggtggtggttccaagagaagccaagtgcagtgacatggttgctcttccaaggaggtggcaatgatggcaagaaagcagtgtgtcaggagcttgcaaggcttgtctttggctcctacagcaagttcacctccatctcactagctgatgatgagttcactcatcatgttcactccgattccagctccggcgagcccatgttgaagaggcaaagatcactggacactgggcatggctacattcagagattgtacgatgcgatactcaaaagccctcatcgggtgataatgatcgacggtgttgagcaactggactatgagtcggagatcggcatcaggaatgcaatcacaaatggaagaattaggggttgcaatggtgatgagatcagtttgggggatgccatcattgtattgagttgtgaagcactcgattcaatgtctaacgcttcctctcctcggctcaagcaaagggtcatcaataagaatggaaaggaaggaaatggcatgaacatagagaatgggatggagtcatctggttttaccttggatttgaatgcatgcgccgaggatagtgaagggaatgaagagagtgtttcagataatgcgaggatcattaatattgtggatggtgtgttcttcttccaattaatggagcactcatga

SEQ ID NO: 38 - protein, 883 aa, Sorghum bicolor
  [CDS]:1..2652 from SEQ ID NO 37
MRAGGCAVQQALAAEAAAVVRQAVALARRRGHAQVTPLHVASAMLSAAGLLRAACLRSHSHPLQCKALELCFNVALNRLPTAGPAAAAVMFHPHHHHHHAGHGQQHAVPVLSNALVAAFKRAQAHQRRGVVEGVQGQGQGQAPAQPPPQPVLAAKVDIEQLIISILDDPSVSRVMREAGFSSSQVKANVEKAVSLSSSSSLPDHQPNTTIPPSGAHATGSPAAGGSGHASSRRPNAGGNKADDDDAMRVLDCMASGTKRCVVVVGESAATAEVVVKSVMDRVSKGELQQRHERLKNVQFVPLSAASFQRMPREEVEAKAGDLRALVRQGCAAGKGVVLVLEDLAFAADAWAAVSERRRHGSVGREHGQCGYCPVEHAVMEVGSLVSAAAGGGGGGRGLDRFWLLGFGNNQAYMKSRAGQPSLEAVWELHPVVVPDGGLSLSLTCNSDAEQANQDRATRPWPSFVNGTASGESELITSSTKVAATTPSVPPWFRGYQVQDMTRPASRSASFQLQDWNHNFNGSPAYHTSELTLSFSSQATNSPDASSISSSFAPSFSAASLMMSSEPWQFKVMQPCPNYRRDDPNALVRTYDHQQLHGRPSPEKSYSVSNSSEGAPAESPKFTELTAENLKILCNALENRAPHHKDVATEIASVVLQCRSGMTRRRWWFQEKPSAVTWLLFQGGGNDGKKAVCQELARLVFGSYSKFTSISLADDEFTHHVHSDSSSGEPMLKRQRSLDTGHGYIQRLYDAILKSPHRVIMIDGVEQLDYESEIGIRNAITNGRIRGCNGDEISLGDAIIVLSCEALDSMSNASSPRLKQRVINKNGKEGNGMNIENGMESSGFTLDLNACAEDSEGNEESVSDNARIINIVDGVFFFQLMEHS

SEQ ID NO: 39 - DNA, 2625 bp, Sorghum bicolor
  source 1..2625: /organism="Sorghum bicolor" /mol_type="unassigned DNA"
  CDS 1..2625
atgagggccggggggtgcacggtgcagcagtcgctgacggcggaggccgcggcggtggtgaagcaggcggtgagcctcgcgcggcggcgcgggaacgcgcaggtgacgccgctgcacgtggcgagcgcgatgctggcggcgccggcgggcctgctgcgcgcggcgtgcctccgctcgcactcccacccgctgcagtgcaaggcgctggagctctgcttcaacgtcgcgctcaaccgcctccccgcgtcggccgcggtcgcctcgtcgccgctgctcggcggacacgggcacggccaccaccactactacccgccgtcgctgtccaacgcgctcgtcgcggcgttcaagcgcgcgcaggcgcaccagcggcgcggctccgtcgagagccagcagcagcccgtgctcgccgtcaagatcgagctggagcagctcgtcgtctccatcctcgacgaccccagcgtcagccgcgtgatgcgcgaggctggcttctccagcacccaggtcaaggccaacgtggagcaggccgtgtgcagcacaacaacgaccaccgcggccacggccgccgctccaggcaaaaaccctaaccctagcagctctgccaccacgagcccaacagctcaggaagccaaagccatcaacaagctgccgctgccgctcccgctccaccaagcgcgcgacgaggacgtggccgccatcctggactgcttggcgtcccggagcaagaggagggtcgtcgtcatcgcggagagcgtgtccgcggccgaggccatggcgcatgcggccgtggacaagatcaagagagccgaggcgaagcacgacgcgctgcgtggcgcgcaggtcgtcagcctccgcgtgtcgtcgttccgcgacatgccgagagaggagaccgagcggcggctcggcgagctgcggtgcctcgtcaggggcaggaggcagcaggaggtcgtgctcgtcgtggaggacctcaagtgggcggccgagttctgggcgggccacgtccagagcgggaggagagggtactacagctccgtcgagcacgtcgtcacggagctgcgcgccctgctggcgagcggcggcggcggcgaccacggcggcggcagcatgtgctggctcctcgggttcgggacgtaccaggcctacatgaggtgtcgggtcgggcagccgtcgctggagagcctgtgggggctccagacgctcaccgtgcccgccggcagcctggtgctgagcctcacctgcgccttcgacgacagtgctctaggcacggtcaatcagtccatgaaagccggctctgacacggatgggaacgcaccggcgtcttgctggccgcttttgggcggcacccagctcatttccagatgctgcgccgattgctctgccgcgaggatcgacacgaaagcggcgttgcctcggcccttcgtctcgtcgtcgtccaccctcccttcctggctccagcattgccgtgatcatcaggagcctactacgacccatcttacggaccttggcaagacatggagctccatctgcagcaggccgtcgtcacagcggatgacgctgcatttctccgcgccggtgtctccggcgtcctccatctcttcctatgagcacggcggcgatcatcatcatcagtcgcagcagccgcggcactcgtcgtggctcctcgctggtctcgacgccgccgcgcccgcgcaccaccacccgtggagacccaagcgcgaggccagcggcgggaataaggccgccgccagcaggtcccacgactccggcggctcgaacggctccgtggaggtggagtgccgccgcgccaaggccaagttcaaggagctcagcgccgagaacctcaaggtgctctgcggcgcgctggagaaagaagtgccgtggcagaaggagatcgtcccggagatcgccagcgccgtcctgcagtgccggtcggggatcgccaagcggcgcgacaagtcgaggtcggcggacgccaaggaggagacgtggatgttcttcctcggcggcgacgccgacggcaaggagaaggtggcgagggagcttgctagtctcgtcttcgggtcacgcaacagcttcgtatccatcaggcctggtgggggtgcctctgcctcgtcgccgccgccgcctgccgccgcctcgtccgaggagcaccaccggagtaagcggccacggatggcggcggcctacctagaacggttgcacgaggctgtctccgagaacccacaccgggtcatattcatggaggacgtcgagcgggctgaccgggactgccagctcggcatcaaggaggcgatcgagagcggggtcgtgcggaaccatgctggcgaggaggtcggcgtgggcgatgccatcgtcattctcagctgcgagagctttgacggcgacagcaggtctagaggttgctcgccgccgagcaagaaggtgaaggtagagatggaggagaccaaggaggagcgcacaggtgaacatgaacacaacgaagatggcgcttcctcgtcgtctccgtcgtgcatcgatttgaacgtggacatggagagtgatccggcggacgagcgaagtctcggtgatctctgtctgctcacggccgtcgacaggaccctattcttcagaagacaacaagagaattag

SEQ ID NO: 40 - protein, 874 aa, Sorghum bicolor
  [CDS]:1..2625 from SEQ ID NO 39
MRAGGCTVQQSLTAEAAAVVKQAVSLARRRGNAQVTPLHVASAMLAAPAGLLRAACLRSHSHPLQCKALELCFNVALNRLPASAAVASSPLLGGHGHGHHHYYPPSLSNALVAAFKRAQAHQRRGSVESQQQPVLAVKIELEQLVVSILDDPSVSRVMREAGFSSTQVKANVEQAVCSTTTTTAATAAAPGKNPNPSSSATTSPTAQEAKAINKLPLPLPLHQARDEDVAAILDCLASRSKRRVVVIAESVSAAEAMAHAAVDKIKRAEAKHDALRGAQVVSLRVSSFRDMPREETERRLGELRCLVRGRRQQEVVLVVEDLKWAAEFWAGHVQSGRRGYYSSVEHVVTELRALLASGGGGDHGGGSMCWLLGFGTYQAYMRCRVGQPSLESLWGLQTLTVPAGSLVLSLTCAFDDSALGTVNQSMKAGSDTDGNAPASCWPLLGGTQLISRCCADCSAARIDTKAALPRPFVSSSSTLPSWLQHCRDHQEPTTTHLTDLGKTWSSICSRPSSQRMTLHFSAPVSPASSISSYEHGGDHHHQSQQPRHSSWLLAGLDAAAPAHHHPWRPKREASGGNKAAASRSHDSGGSNGSVEVECRRAKAKFKELSAENLKVLCGALEKEVPWQKEIVPEIASAVLQCRSGIAKRRDKSRSADAKEETWMFFLGGDADGKEKVARELASLVFGSRNSFVSIRPGGGASASSPPPPAAASSEEHHRSKRPRMAAAYLERLHEAVSENPHRVIFMEDVERADRDCQLGIKEAIESGVVRNHAGEEVGVGDAIVILSCESFDGDSRSRGCSPPSKKVKVEMEETKEERTGEHEHNEDGASSSSPSCIDLNVDMESDPADERSLGDLCLLTAVDRTLFFRRQQEN

SEQ ID NO: 41 - DNA, 2445 bp, Sorghum bicolor
  source 1..2445: /organism="Sorghum bicolor" /mol_type="unassigned DNA"
  CDS 1..2445
atgcgtagcggcggctgcgcggtgcagcaggagctggccggggacgcggcggccgtgatgcggcaggcggtgagcctggcgcggcgccggggccacgcgcaggtcacgccgctgcacgtcgccagcgccgtgctctcggtctcggacgccggggcactcctccgcgccgcctgcctccggtcccgggccagctcccacccgctccagtgcaaggcgctggagctctgcttcaacgtcgcgctcaaccgcctcgcgacgacggcggggatgccgggaccgccggccccgccgccggccatgttccagttccaccacgcgccggctggtgggcaccgcgcgccggcgctgtccaacgcgctcgccgccgcgttcaagcgcgcgcaggcgaaccagcgccggggcggcggcggcggtggcttcggcgtccgccgcggaggccggccagcaccagcaccagtcgagctcgagcagctcgtcatctccatcctcgacgatcccagcgtcagccgcgtcatgcgcgatgccggcttcgcgagcgccgaggtcaatgccaacgtcgagaaggccgtctcgtcgtcggagcagtcgtcgaacacggcaaccagcagcaccgcttccccgaatactactactaataataaccccaccaaggacaaggagtccagagccaaggccgacgacatcgtcggcgacgccgtgcgcgtgctggactgcatggcgagcgggacgaaccggtgcgtggtggtcctcggcgagaccgccgccgccgcggagagggtggtcaaggcggtgatggacaaggtgagcaagggggagctgcggcgccgccagcacgagcgcctcaagaacgcccagttggtgcccttctcggccgcatccttccagcggatgccgagggaggaggtcgaggccagggccggcgacctgtgcgcgctcgtgcgcgagtgctgcgccgccggcagaggcgtggtgctcgtgctcgaggacctcgcctacgcggcggaggcctggaccgccgcgtcgtggaagagatcaagtggccaccgcgcgcatggcctcatcgactattgtcccgtccagcacgcggtcatggagttgagcagcctcgtgcgcggcgccggcggccgcggccgcgacaagggcatgttctggctgctggggttcggagcctccgcgtcctacacgagctgcaggtcggggcagccttccctggagaccgtcttgggactacaccccgtcgtcgtgccggacggcggcctcgcgttgagcctcggcggcgacagtgaggtcacacactgcagcgccggcacggtcgtggcgacggcggcggcggcgagcatccccgcgtggattcgccgttgccaaggtccagccctcactggatcggagctcacactgagcttctcctctccggcctcttcctcccactgtggctttacccattatgacaccaacaagagctgcgagccatggcatgatctcatggaccggcggcaaccgttgctgaaccgccggcacgatggtccgatggccgagccatacgatcagctgtggctcgccgcaaaccctaattcagggtcctccaactcggtgtccaataaatccaactcatcggatggcacgacgacgacggctcgccgccggcgtccgaagttcaccgagctcaccgcggagaatctcaaggtcctgagcagcgcgctcgagacgcgcgtcccgcgccacagagacatagctccgggcatcgccagcgccgtgctccagcgccgctccggcgtgacgaggacgacgaggccgaccccggcgacgtggctcctcttccaagggagggacaacgacggcaagatggccatggctcgggagcttgccaggcttgtctttggctcctacgccgagttcacctgctgcttcgccgcagcagcatcaaagctcgcaccggatcactccggctccagcagccccggcgatcgccgcagcctaaagaggcagaggtcgtcgccggacaacgagcacggcggctgcatgcagatgttctacgaggcgatccgggaaaaccctcaccgtgtcgtgctggtcgacggcggcgtcgagcacgactcggaactagaagtcggcatcatggatgccatggcgagcggaaccgtgaggggttgcgatggtggtgtggtcagcttggaggactctatcgtagtgtactgctgtgaagtgttcgtcgagtcggtgtcatcgcctagggtttcctcaccacggcctgtgaagcaaaggatcatcacgagtggcgacgttgacagcaaggtggaagatgatggcgcagagaaaggagtagttgtgccacgtttcagcttggatttgaatgcgtgcgccattgacggcgaaggggaggaagggagttcttcgtataatgccatggagatccttaatgttgtggatggtgttttcttcttctag

SEQ ID NO: 42 - protein, 814 aa, Sorghum bicolor
  [CDS]:1..2445 from SEQ ID NO 41
MRSGGCAVQQELAGDAAAVMRQAVSLARRRGHAQVTPLHVASAVLSVSDAGALLRAACLRSRASSHPLQCKALELCFNVALNRLATTAGMPGPPAPPPAMFQFHHAPAGGHRAPALSNALAAAFKRAQANQRRGGGGGGFGVRRGGRPAPAPVELEQLVISILDDPSVSRVMRDAGFASAEVNANVEKAVSSSEQSSNTATSSTASPNTTTNNNPTKDKESRAKADDIVGDAVRVLDCMASGTNRCVVVLGETAAAAERVVKAVMDKVSKGELRRRQHERLKNAQLVPFSAASFQRMPREEVEARAGDLCALVRECCAAGRGVVLVLEDLAYAAEAWTAASWKRSSGHRAHGLIDYCPVQHAVMELSSLVRGAGGRGRDKGMFWLLGFGASASYTSCRSGQPSLETVLGLHPVVVPDGGLALSLGGDSEVTHCSAGTVVATAAAASIPAWIRRCQGPALTGSELTLSFSSPASSSHCGFTHYDTNKSCEPWHDLMDRRQPLLNRRHDGPMAEPYDQLWLAANPNSGSSNSVSNKSNSSDGTTTTARRRRPKFTELTAENLKVLSSALETRVPRHRDIAPGIASAVLQRRSGVTRTTRPTPATWLLFQGRDNDGKMAMARELARLVFGSYAEFTCCFAAAASKLAPDHSGSSSPGDRRSLKRQRSSPDNEHGGCMQMFYEAIRENPHRVVLVDGGVEHDSELEVGIMDAMASGTVRGCDGGVVSLEDSIVVYCCEVFVESVSSPRVSSPRPVKQRIITSGDVDSKVEDDGAEKGVVVPRFSLDLNACAIDGEGEEGSSSYNAMEILNVVDGVFFF

SEQ ID NO: 43 - DNA, 2517 bp, Zea mays
  source 1..2517: /organism="Zea mays" /mol_type="unassigned DNA"
  CDS 1..2517
atgcgagccggcggctgcgcggtgcagcaggcgctggccgcggaggcggcggccgtggtgcggcaggccgtggccctggcccggcggcgcggccacgcgcaggtgaccccgctccacgtggccagcgccatgctctcggcggcggggctcctccgcgccgcctgcctccgctcccactcccacccgctgcagtgcaaggccctggagctctgtttcaacgtggcgcttaaccgcctccccaccgccgccgcctctatgttccacccccatcaccacgccgggcagcagcacgcgcccgtgctgtccaacgcgctcgtcgccgcgttcaagcgcgcgcaggcgcaccagcgccggggctccgtggatggagcacagggacaaccgccacagccggtgctcgccggcaaggtcgacatcgaccagctcatcatctccatcctcgacgaccccagcgtgagccgcgtcatgcgcgaggccggcttctccagctcccaggtcaaggccaacgtcgagaaggccgtctcggcgtcgtcttcaccggagcatcagcagcagaacacgacgataccacccaccagccgcgcccacgcggcgatctctccaggcggagcagcttccggcgacgccatgcgcgtgctcgactgcatggcgagcggaagcaagcggagcgtggtggtcgttggcgagagcgcggccaccgcggaggtggtggtgaaggcggtgatgaacagggtgagcaaaggggagctgcagcagcggcacgagcggctcaagaacgtccagttcgtgcccctctcggccgcgtccttccagcggatgccgagggaggaggtggaggccaaggccgccgacctgcgcgcgctcgtccgccagggctgcgccgccgggaagggcgtcgtgctcgtcctcgaggacctcgcgtacgccgccgaggcctgggccgccgtgtcagagacgagaaggaggagcagcggcagtggcggccgtgatcacggccagggctgctactgccccgtcgagcacgccgtcatggaagtgggcagcttggtgtccgctgctgccggaggcggcggcagaggcctggacaggttctggttgctagggtttgggaacaaccaggcttatttgaagtccagagcagggcagccatctcttgaggctgtctgggagctgcaccccatcgtcgtgccggacggcggcctcgcgctgagcctcaggtgcaacagtgacgccgaacaagctagagcaacaaggccttggcccttcgctaacggcactgcagcaaccggcgacagtgagctcatcactttgtcctgcgccaaggtggcggcgacaactccaaatgtgccgccatggcttcagggctaccaagttcaagatacgaccagactggcgagccgcagcaccagttttcagatgcaagattgggaccccaactctaatggagcagcttaccacacgtcggagatcacactgagcttctccccacaggctactaactctccagacgcttcttcaatctccggctcctttgcccccagcttgatgatgagctccgaaccatggcaattcaagctgatgcaaccgtgcccaaactatggacgtggcgatccatttgccaggtcctctgatcgtcaacaactgcttccaaggccgactagtccagaaaaatcttactccgtgtccaactcatccgaaggtgcccctgcagccgagtcgccaaaattcacggagctcaccgctgagaatctcaagatcctctccaacgcgcttgagaaccgagctccacgtcacaaggatgtggttacagagatcgcaagtgtcgtgctccagtgccgctcgggcatgacaagaaagaggaggagatggtgctgccaagagaagccaagtgcagtgacatggctgctcttccaaggagcgggcaatgatggcaagaaagccgtgtctaaggagctcgcaaggctcgtcttcggttcctacagcaagttcaccgccatctcactatccgagttcacccacgtccactccgattccagctccggcgagatcacgttgaagaggcaaagatcactggacactgggcgtagctacgttcagagattgtatgatgcaatactcgaaaaccctcatcgggtgataatgatcgacggtgttgagcaactggactacgagtcagagatcggcatcaggaatgcgatcacaaatggaagaattaggggttgcaacggcgacgagatcagtctgggggataccatcatagtactgaattgtgaagcactccgttcaatgtctaacgcttcctcccctcggctcaagcaaagggtcatcgagaaggatggaaaggaaggaaatgacatgaacatggagaatgggatggagtcatctggttttaccttggatttgaatgcatgtgccgaggattgtgaagggaactatgaagagagtgtttcagataatgcgaggatcgttaatattgtggatggcgtgttcttcttccaattaatggagcactcatga

SEQ ID NO: 44 - protein, 838 aa, Zea mays
  [CDS]:1..2517 from SEQ ID NO 43
MRAGGCAVQQALAAEAAAVVRQAVALARRRGHAQVTPLHVASAMLSAAGLLRAACLRSHSHPLQCKALELCFNVALNRLPTAAASMFHPHHHAGQQHAPVLSNALVAAFKRAQAHQRRGSVDGAQGQPPQPVLAGKVDIDQLIISILDDPSVSRVMREAGFSSSQVKANVEKAVSASSSPEHQQQNTTIPPTSRAHAAISPGGAASGDAMRVLDCMASGSKRSVVVVGESAATAEVVVKAVMNRVSKGELQQRHERLKNVQFVPLSAASFQRMPREEVEAKAADLRALVRQGCAAGKGVVLVLEDLAYAAEAWAAVSETRRRSSGSGGRDHGQGCYCPVEHAVMEVGSLVSAAAGGGGRGLDRFWLLGFGNNQAYLKSRAGQPSLEAVWELHPIVVPDGGLALSLRCNSDAEQARATRPWPFANGTAATGDSELITLSCAKVAATTPNVPPWLQGYQVQDTTRLASRSTSFQMQDWDPNSNGAAYHTSEITLSFSPQATNSPDASSISGSFAPSLMMSSEPWQFKLMQPCPNYGRGDPFARSSDRQQLLPRPTSPEKSYSVSNSSEGAPAAESPKFTELTAENLKILSNALENRAPRHKDVVTEIASVVLQCRSGMTRKRRRWCCQEKPSAVTWLLFQGAGNDGKKAVSKELARLVFGSYSKFTAISLSEFTHVHSDSSSGEITLKRQRSLDTGRSYVQRLYDAILENPHRVIMIDGVEQLDYESEIGIRNAITNGRIRGCNGDEISLGDTIIVLNCEALRSMSNASSPRLKQRVIEKDGKEGNDMNMENGMESSGFTLDLNACAEDCEGNYEESVSDNARIVNIVDGVFFFQLMEHS

SEQ ID NO: 45 - DNA, 2508 bp, Zea mays
  source 1..2508: /organism="Zea mays" /mol_type="unassigned DNA"
  CDS 1..2508
atgcgagccggcggctgcgcggtgcagcaggcgctggccgcggaggcggcggccgtggtgcggcaggccgtggccctggcccggcggcgcggccacgcgcaggtgaccccgctccacgtggccagcgccatgctctcggcggcggggctcctccgcgccgcctgcctccgctcccactcccacccgctgcagtgcaaggccctggagctctgtttcaacgtggcgcttaaccgcctccccaccgccgccgcctctatgttccacccccatcaccacgccgggcagcagcacgcgcccgtgctgtccaacgcgctcgtcgccgcgttcaagcgcgcgcaggcgcaccagcgccggggctccgtggatggagcacagggacaaccgccacagccggtgctcgccggcaaggtcgacatcgaccagctcatcatctccatcctcgacgaccccagcgtgagccgcgtcatgcgcgaggccggcttctccagctcccaggtcaaggccaacgtcgagaaggccgtctcggcgtcgtcttcaccggagcatcagcagcagaacacgacgataccacccaccagccgcgcccacgcggcgatctctccaggcggagcagcttccggcgacgccatgcgcgtgctcgactgcatggcgagcggaagcaagcggagcgtggtggtcgttggcgagagcgcggccaccgcggaggtggtggtgaaggcggtgatgaacagggtgagcaaaggggagctgcagcagcggcacgagcggctcaagaacgtccagttcgtgcccctctcggccgcgtccttccagcggatgccgagggaggaggtggaggccaaggccgccgacctgcgcgcgctcgtccgccagggctgcgccgccgggaagggcgtcgtgctcgtcctcgaggacctcgcgtacgccgccgaggcctgggccgccgtgtcagagacgagaaggaggagcagcggcagtggcggccgtgatcacggccagggctgctactgccccgtcgagcacgccgtcatggaagtgggcagcttggtgtccgctgctgccggaggcggcggcagaggcctggacaggttctggttgctagggtttgggaacaaccaggcttatttgaagtccagagcagggcagccatctcttgaggctgtctgggagctgcaccccatcgtcgtgccggacggcggcctcgcgctgagcctcagtgacgccgaacaagctagagcaacaaggccttggcccttcgctaacggcactgcagcaaccggcgacagtgagctcatcactttgtcctgcgccaaggtggcggcgacaactccaaatgtgccgccatggcttcagggctaccaagttcaagatacgaccagactggcgagccgcagcaccagttttcagatgcaagattgggaccccaactctaatggagcagcttaccacacgtcggagatcacactgagcttctccccacaggctactaactctccagacgcttcttcaatctccggctcctttgcccccagcttgatgatgagctccgaaccatggcaattcaagctgatgcaaccgtgcccaaactatggacgtggcgatccatttgccaggtcctctgatcgtcaacaactgcttccaaggccgactagtccagaaaaatcttactccgtgtccaactcatccgaaggtgcccctgcagccgagtcgccaaaattcacggagctcaccgctgagaatctcaagatcctctccaacgcgcttgagaaccgagctccacgtcacaaggatgtggttacagagatcgcaagtgtcgtgctccagtgccgctcgggcatgacaagaaagaggaggagatggtgctgccaagagaagccaagtgcagtgacatggctgctcttccaaggagcgggcaatgatggcaagaaagccgtgtctaaggagctcgcaaggctcgtcttcggttcctacagcaagttcaccgccatctcactatccgagttcacccacgtccactccgattccagctccggcgagatcacgttgaagaggcaaagatcactggacactgggcgtagctacgttcagagattgtatgatgcaatactcgaaaaccctcatcgggtgataatgatcgacggtgttgagcaactggactacgagtcagagatcggcatcaggaatgcgatcacaaatggaagaattaggggttgcaacggcgacgagatcagtctgggggataccatcatagtactgaattgtgaagcactccgttcaatgtctaacgcttcctcccctcggctcaagcaaagggtcatcgagaaggatggaaaggaaggaaatgacatgaacatggagaatgggatggagtcatctggttttaccttggatttgaatgcatgtgccgaggattgtgaagggaactatgaagagagtgtttcagataatgcgaggatcgttaatattgtggatggcgtgttcttcttccaattaatggagcactcatga

SEQ ID NO: 46 - protein, 835 aa, Zea mays
  [CDS]:1..2508 from SEQ ID NO 45
MRAGGCAVQQALAAEAAAVVRQAVALARRRGHAQVTPLHVASAMLSAAGLLRAACLRSHSHPLQCKALELCFNVALNRLPTAAASMFHPHHHAGQQHAPVLSNALVAAFKRAQAHQRRGSVDGAQGQPPQPVLAGKVDIDQLIISILDDPSVSRVMREAGFSSSQVKANVEKAVSASSSPEHQQQNTTIPPTSRAHAAISPGGAASGDAMRVLDCMASGSKRSVVVVGESAATAEVVVKAVMNRVSKGELQQRHERLKNVQFVPLSAASFQRMPREEVEAKAADLRALVRQGCAAGKGVVLVLEDLAYAAEAWAAVSETRRRSSGSGGRDHGQGCYCPVEHAVMEVGSLVSAAAGGGGRGLDRFWLLGFGNNQAYLKSRAGQPSLEAVWELHPIVVPDGGLALSLSDAEQARATRPWPFANGTAATGDSELITLSCAKVAATTPNVPPWLQGYQVQDTTRLASRSTSFQMQDWDPNSNGAAYHTSEITLSFSPQATNSPDASSISGSFAPSLMMSSEPWQFKLMQPCPNYGRGDPFARSSDRQQLLPRPTSPEKSYSVSNSSEGAPAAESPKFTELTAENLKILSNALENRAPRHKDVVTEIASVVLQCRSGMTRKRRRWCCQEKPSAVTWLLFQGAGNDGKKAVSKELARLVFGSYSKFTAISLSEFTHVHSDSSSGEITLKRQRSLDTGRSYVQRLYDAILENPHRVIMIDGVEQLDYESEIGIRNAITNGRIRGCNGDEISLGDTIIVLNCEALRSMSNASSPRLKQRVIEKDGKEGNDMNMENGMESSGFTLDLNACAEDCEGNYEESVSDNARIVNIVDGVFFFQLMEHS

SEQ ID NO: 47 - DNA, 2523 bp, Vitis vinifera
  source 1..2523: /organism="Vitis vinifera" /mol_type="unassigned DNA"
  CDS 1..2523
atgagagcaggagtttgcagtgtacagcaggttctaactgctgatgcagcaagcatggtcaaacaagcagttacccttgctaggcggcgaggtcatgcccaagttactcctcttcatgtggccagtgtcatgcttgcttcctcctctggtcttctccgctctgcttgcctacgatcccactctcatcccctgcagtgcaaggctctggagctctgcttcaatgtggcgctcaaccgcctccctgcctcctcatcaagccccctattagctcctcattcctctcacccttccttgtccaatgccttggttgcagccttcaagcgtgcacaggctcaccaacgccgtgcctccatcgaaaaccagcaacaacccattctagctctcaaagtagagatagaacagctcataatctccatcctacatgacccaagtgttagtagagtcatgagagaggctggtttctctagtacccaattgagaaccaacatagaacaagctgtctctttggatgtttgttctcaaagccctgctgtgagtagcctgtctaaggaaataactctgaacaatccatttgacgaagctcaggaagaagatgtaaagagtcttttggacgcatttacaagcaaaagaaggagaaacactgttgttgtaggagagactctggccagtgctgagggtgtagttagagggctgatgaacaagtttgagagaggagatgtccctggagatctgaggtatgtgcagtttataagccttcctctcttctctttaaagaatctctccaaggaggaggttgaacagaagcttgtgaagctgacttgccttctgaaaagctatgtgtgtagaggggtggttttgtatttgggtgatctcaaatgggtctctgagtttgagtcaaattatggtgagaggagaaactactgctctcctgtggagcacataatcatggagctcggaagaatgatgtgtggaattggggatagaggacgaatgtggcttttggggactgcaaccttccaaacttacatgagatgcaaagcaggccatccttctttggagactatttgggaacttcatcctcttactattcctgttggcagcttgggcctcggtctcaatcttgacagcaatttgcagggccggttccaaagtaaggcatctggagatgggacttcttggtcactacttcaaagtggagataagcaccttacttgcagcacaaattgctctgataattttgacaaagaatctcaaagtatagcatgcagttttcgcaatggcgagtccaccaccaccatcaccacttccaccagctcaagcttgccttcatggctccaaaaagagaaaagaagaaagatcatggacgatcaggaatgtgtccaagtcagagatctctgcaacaaatggaactcgttttgcagctcagtccacaaaaaggcccacagtactgagaaagccctgaatttttcttcaccatctccttcctccacttccatctcctcctatgaccaatgcagccctaatctgcaacagaaccacctaagttggccagccatcattgagccgaaaccacctctgaaagaacaccagttctggatatctgaaaatgttgatgaaggccttgaacccaagttcagtatgcacatagcagagagaaattttccaataccagatcttttatcaaatcctaactcttcccctaattcagcttcttctagtgaggcaatagaggatggagagggtctttatggtttcaaagagcttaatgcggagaatctgagaatcttatgcaatgcattggagagaagggttccatggcagaaggatatcattcctgaaatagcaagcaccattcttgaatgcaggtcaggaacactgagaggaaaaaacaagttgaagcagagggaggacaaggaagaaacttggctgctcttcttaggagttgactttcaaggcaaagacaagattgcaagggagatagctaagcttgtttttggctctcagagcaagttcatctcaattggtctgagcagtttaggatcaacaagagctgattccaccgaggatttcctaagcaaacaagcaagagacgagcctgttggtagttatattgagaaattcgctgaagcggtgcatgagaatcctcacagagtgttcttcatagaagatgtggagcaactagattactcttctcaaatgggggttaagagaggaattgagagtggaagaatacaaattgctggaggtgaagcattttctcttgaggatgccatcatcatattcagttgtgaaagcttcagctcagtatcaagagccagctctcctccacccatggggctaaaatctgaagagaatgaggaaaaagaccgggataatgagttggagaagagaagcccatgtgtgtctctagatctgaatctttcagctgaagataatcaagaatatggacaaaactcggttgcagacactggggttctagattctgtggacaggcagtttattttcaaaattcaagagttgtga

SEQ ID NO: 48 - protein, 840 aa, Vitis vinifera
  [CDS]:1..2523 from SEQ ID NO 47
MRAGVCSVQQVLTADAASMVKQAVTLARRRGHAQVTPLHVASVMLASSSGLLRSACLRSHSHPLQCKALELCFNVALNRLPASSSSPLLAPHSSHPSLSNALVAAFKRAQAHQRRASIENQQQPILALKVEIEQLIISILHDPSVSRVMREAGFSSTQLRTNIEQAVSLDVCSQSPAVSSLSKEITLNNPFDEAQEEDVKSLLDAFTSKRRRNTVVVGETLASAEGVVRGLMNKFERGDVPGDLRYVQFISLPLFSLKNLSKEEVEQKLVKLTCLLKSYVCRGVVLYLGDLKWVSEFESNYGERRNYCSPVEHIIMELGRMMCGIGDRGRMWLLGTATFQTYMRCKAGHPSLETIWELHPLTIPVGSLGLGLNLDSNLQGRFQSKASGDGTSWSLLQSGDKHLTCSTNCSDNFDKESQSIACSFRNGESTTTITTSTSSSLPSWLQKEKRRKIMDDQECVQVRDLCNKWNSFCSSVHKKAHSTEKALNFSSPSPSSTSISSYDQCSPNLQQNHLSWPAIIEPKPPLKEHQFWISENVDEGLEPKFSMHIAERNFPIPDLLSNPNSSPNSASSSEAIEDGEGLYGFKELNAENLRILCNALERRVPWQKDIIPEIASTILECRSGTLRGKNKLKQREDKEETWLLFLGVDFQGKDKIAREIAKLVFGSQSKFISIGLSSLGSTRADSTEDFLSKQARDEPVGSYIEKFAEAVHENPHRVFFIEDVEQLDYSSQMGVKRGIESGRIQIAGGEAFSLEDAIIIFSCESFSSVSRASSPPPMGLKSEENEEKDRDNELEKRSPCVSLDLNLSAEDNQEYGQNSVADTGVLDSVDRQFIFKIQEL

SEQ ID NO: 49 - DNA, 2547 bp, Vitis vinifera
  source 1..2547: /organism="Vitis vinifera" /mol_type="unassigned DNA"
  CDS 1..2547
atgagagccggaggttgtacagtgcaacaggctctaactgcggaggcggccggcgtggtgaaacaagcagtaacccttgctaggcggcgtggacatgcccaagtcactcctctacatgtagccaacaccatgctcgccgctacaaacggcctgctccgaaccgcttgtcttcaatcccactcccaccccctccagtgcaaagccctagaactttgcttcaacgttgccctcaaccgccttccagcctccacatccagtcccatgctgggtcctcattcccaacatccttccatctccaacgcattggttgctgccttcaagcgagctcaggcccatcagcgacgcggctctattgagaaccagcagcaacctcttctagcagttaaaatagagctagagcagctcataatctctattttagatgatcctagtgtgagtagagtcatgagagaagctgggttctccagtacccaagtgaaaagcaatgtagagcaagctgtctccttggaaatctgctctcaagctccatccgtgagtagtaagtccaaggaaagtaaccttctagtcctgtcccagtctcctcccatgggtcaaattggagtaaagctaggcaaaccaacggtgccagatccagtcaggaatgaggatgtgatgagtgtaatagagaatctgatgaataaaaggaggaaaaatactgtgattgttggagagtgtctggcgactatcgagggtgtagttagaggggtgatggacaaagttgacaagggagatgttccagaggctttgagagatgttaagcttataagccttcctctcttctcttttggacatcactccagagaagaggtcgaacagaagctcggggagctcaagagccttgtgaagagttgcgtgggaagaggggttattttgtatttggaagatcttaaatggactacggattatagagctagttctagtgagcaagggaggaactattattgtcccgtggagcacatgatcatggagcttgggaaattggtttgtggatttggggagaacggaaggttttggctcatgggaatcgcaactttccaaacttactcgagatgtagaactggccatccatcgctggagactatttggagtctacatcctcttacaattcctgcaagcagcttggccttgagtctcatgcctgacagtcagttcagtagcaaaaaggctggaagtgggaccagtaattggcttatgcttgaaggtggagcggagaagcagcttacttgctgcgctgattgctcagccaatttcgagaatgaagctcgaagcataccaaccagcacttgtaacagtgattccacaacttcaacccttccaacatggctccaacagtacaaagatgagaacaaaaaactttcccgtaatgatcaggactgtgtagcagtcagagatctctgcaaaaaatggaattctatttgcagttctgcccacaaacaaccccactcatctgagaaaaccctaacattctcttctctttcaccttcttcctctacttctggcttttcatatgaccagcaatatcctaatttgcaccagacccaccaaggttggccagtggttgaacacaaacagtcctggagagacaatcatttctgggtttccgaagctcttaacaaaacctatgaacccagtttgagaatgtacattccggagcattctgatcgcaaatatgcgtcgaaccctaattctacccctaattcggcctcttcaagcgatgtcatggaaatggagtacgttcaaaggttcaaggagctcaacgctgagaacctgaacactctatgcaatgcattggagaaaaaggtcccatggcagaaagatataattcctgacatcgctagcacgatcttacaatgcaggtctggaatggtaagacgcaaaggaaaggtcaaaaatagcgagaccaaagaagaaacatggtttttcttccaaggcgttgatatggatgctaaagagaagattgcgagagaattggctagacttgttttcggctcccagaacaacttcgtttcaattgctctgagcagcttctcatctacaagggcggattcaacagaagatctccgaaataagagatcaagagatgagcaaagctgcagttacatcgagaggttcgctgaggcagtgggcagtaatccacaccgggtattcttagcggaagatgtggagcaagcggattactgctcccaaatgggtatcaaaagggccacagaaagaggaagaataaccaattcgaatggagaagaaatcagcctgagcgacgcaatcatcattttgagctgtgaaagcttcagctcgaggtctagagcctgctcacctccaatcaaacaaaaatcagatgagttcgaagaggagaaaggtggaggtgggggtgaggagataagcccatgtgtgtctttggatttgaatatttgcattgatgatgacggcgttgaggatgaatcaatcgacgacatcggacttcttgaatcagtggatagaaggattactttcaaaattcaggagttataa

SEQ ID NO: 50 - protein, 848 aa, Vitis vinifera
  [CDS]:1..2547 from SEQ ID NO 49
MRAGGCTVQQALTAEAAGVVKQAVTLARRRGHAQVTPLHVANTMLAATNGLLRTACLQSHSHPLQCKALELCFNVALNRLPASTSSPMLGPHSQHPSISNALVAAFKRAQAHQRRGSIENQQQPLLAVKIELEQLIISILDDPSVSRVMREAGFSSTQVKSNVEQAVSLEICSQAPSVSSKSKESNLLVLSQSPPMGQIGVKLGKPTVPDPVRNEDVMSVIENLMNKRRKNTVIVGECLATIEGVVRGVMDKVDKGDVPEALRDVKLISLPLFSFGHHSREEVEQKLGELKSLVKSCVGRGVILYLEDLKWTTDYRASSSEQGRNYYCPVEHMIMELGKLVCGFGENGRFWLMGIATFQTYSRCRTGHPSLETIWSLHPLTIPASSLALSLMPDSQFSSKKAGSGTSNWLMLEGGAEKQLTCCADCSANFENEARSIPTSTCNSDSTTSTLPTWLQQYKDENKKLSRNDQDCVAVRDLCKKWNSICSSAHKQPHSSEKTLTFSSLSPSSSTSGFSYDQQYPNLHQTHQGWPVVEHKQSWRDNHFWVSEALNKTYEPSLRMYIPEHSDRKYASNPNSTPNSASSSDVMEMEYVQRFKELNAENLNTLCNALEKKVPWQKDIIPDIASTILQCRSGMVRRKGKVKNSETKEETWFFFQGVDMDAKEKIARELARLVFGSQNNFVSIALSSFSSTRADSTEDLRNKRSRDEQSCSYIERFAEAVGSNPHRVFLAEDVEQADYCSQMGIKRATERGRITNSNGEEISLSDAIIILSCESFSSRSRACSPPIKQKSDEFEEEKGGGGGEEISPCVSLDLNICIDDDGVEDESIDDIGLLESVDRRITFKIQEL

SEQ ID NO: 51 - DNA, 2595 bp, Ricinus communis
  source 1..2595: /organism="Ricinus communis" /mol_type="unassigned DNA"
  CDS 1..2595
atgagagcaggaatatgcagtgtgcagcaagctcttactgctgaggctgcaaatatagtaaagcaagcagttagccttgctaggcgtcgaggccatgcccaagtcactcctcttcatgtggcaagtgctatgttggcatctacaaatggccttctcagaagagcttgccttcaatcccattctcatcctctccaatgcaaggccttagagctttgctttaatgttgctctaaatcgcctacctgcttccacttccagtgcgttgttaggtcctcattcttcttatccttccttatctaatgccttggttgcagcttttaagcgtgctcaggctcaccagcgtcgaggctccattgaaaaccagcaacaacccattttagctttgaagattgagatagaacagctcataatctctattttagacgacccgagtgttagtagagttatgagggaagctggtttctcaagtacccaagtgaagaacaaggtagaacaggcagtttctttggagatttgttctcaaggcactactgctacaagttgccagtctaaagaaatcactaaacctcaaatttttagcactaataatgtgtctccgtctcttccttttagtcattatggagtcacactaagcaagccattagatcatgaggttagtaatgatgatgtaatgagtgttttaaacacattgatggagaaaaagagaaacacaatcattacaggagaatgtctagctagtacagaaagtgtagttagactagtcatgaataagattgagagaggccttgctcctggggagttgagagcgatgcggttcataagctttcctctcatctctttgagagatcttccacaagaggaggttgagcaaaagcttgtagagcttaggtgcacagtgaagagctatttgaatagaggggttttcttatatttgggtgatatcaaatgggttgctgagttttggtcggaatacggtgagcaaaggagaagctattactgctctggggagtacataatcatggagctgaaaagattaatccgcggaattggtgaaactgaaaggctgtggctcatgggagttgcaactttccagacatacatgaaatgtaagtcaggccgcccttctctagagactatttgggaattatatcctctcccaattccagttggtagcctgagcctgagtctcaatcttgacagtgacctacaatgtcggtaccgaagcaaagtatctaccaatggatatggttggccgaagctcgaatctgcagttgataatcactcaacttgtttcacagacttctctgtcaatttcaatagagatgctcaaagcataggttgcagtcagagggagttcactaccaattttacagtttccactagctcaagcttgccttcatggctcaagcagcataaagtagagacagaaagaatcactattgatgataaggaatattgtacgaatacaagccctcttctgaagaaatggaactcatttggcagctcatttcataataaagaatctcactctcctccaaaaaccataaagtttgcttcatctcctgcttccccaatttccatttcttcccatgagtgcaacaccaacataaatcaagcgcctttaagctggccagtcattttcgagccaagacagtttcagaaagagcagaagatttggttgtctgaatgtaacaatgccgaaggctctgaaagcaatttgattagcgttaccaaaccagagcttttatcaaatcctaactctagcccaaattcagcttcttcaagtgaagcagtggacggcacagaaggcttacaaagcttcaaggagctcaataaccaaaacttgaagattctatgcagtagcttggagaaaaaggttccatggcagaaagatattattcccgaaatcgcgactgccattcttgagtgcaggtccgggaggagcaagagcaaacgcaagtccaataaccgagcagaaagagaagaaacttggctcttcttcttaggagttgattctgaaggaaaggaaaagattgcaagagagttagccagacttgtctatggctcccaagcaaactttgtttcaattggtctaagcaactattcatcaacaagaactgattcaactgatgaatccaagaataagaggggtagagatgagttgggttgtggttatcatgagaggttcggccttgcattgaatgagaatcctcatcgagtattcttcatggaagatgtggagcaagttgattactgttctcaaaaggcaatcaagaaagccattgaaagtggaaaagtagcacttcctggtggcgaaaatgctcctctgaaagatgccattatcattttcggtagtgaaagttatagttcagcgtcaagagcttgttcaccttcaagaagagtaaaaagtagtggggagaaagaagtcaaggatgaagaggatgaatcagatgagaagaacaaagttctctcacttgacttgaacattgccattgatgttaatgacgatgatgaagatgaatactcaaacattgctgataatggaatcctacaatctgttgataggcaaattcttttcaaaattcaagaactgtga

SEQ ID NO: 52 - protein, 864 aa, Ricinus communis
  [CDS]:1..2595 from SEQ ID NO 51
MRAGICSVQQALTAEAANIVKQAVSLARRRGHAQVTPLHVASAMLASTNGLLRRACLQSHSHPLQCKALELCFNVALNRLPASTSSALLGPHSSYPSLSNALVAAFKRAQAHQRRGSIENQQQPILALKIEIEQLIISILDDPSVSRVMREAGFSSTQVKNKVEQAVSLEICSQGTTATSCQSKEITKPQIFSTNNVSPSLPFSHYGVTLSKPLDHEVSNDDVMSVLNTLMEKKRNTIITGECLASTESVVRLVMNKIERGLAPGELRAMRFISFPLISLRDLPQEEVEQKLVELRCTVKSYLNRGVFLYLGDIKWVAEFWSEYGEQRRSYYCSGEYIIMELKRLIRGIGETERLWLMGVATFQTYMKCKSGRPSLETIWELYPLPIPVGSLSLSLNLDSDLQCRYRSKVSTNGYGWPKLESAVDNHSTCFTDFSVNFNRDAQSIGCSQREFTTNFTVSTSSSLPSWLKQHKVETERITIDDKEYCTNTSPLLKKWNSFGSSFHNKESHSPPKTIKFASSPASPISISSHECNTNINQAPLSWPVIFEPRQFQKEQKIWLSECNNAEGSESNLISVTKPELLSNPNSSPNSASSSEAVDGTEGLQSFKELNNQNLKILCSSLEKKVPWQKDIIPEIATAILECRSGRSKSKRKSNNRAEREETWLFFLGVDSEGKEKIARELARLVYGSQANFVSIGLSNYSSTRTDSTDESKNKRGRDELGCGYHERFGLALNENPHRVFFMEDVEQVDYCSQKAIKKAIESGKVALPGGENAPLKDAIIIFGSESYSSASRACSPSRRVKSSGEKEVKDEEDESDEKNKVLSLDLNIAIDVNDDDEDEYSNIADNGILQSVDRQILFKIQEL

SEQ ID NO: 53 - DNA, 2649 bp, Ricinus communis
  source 1..2649: /organism="Ricinus communis" /mol_type="unassigned DNA"
  CDS 1..2649
atgagagcaggaggttgcacagtgcaacaagcactaaccacagaggcagcaacggtcgtaaaacaagctgtaactttggctagacggcgaggccatgcccaagttactcctcttcatgtagctaacaccatgctttcttcttctactggtttattaagaacagcttgtctccaatctcactctcatcctcttcagtgcaaagccttagagctctgtttcaacgttgcgcttaatcgtcttccagcatcaacgtcaagccctgtgttaggtactcacgctcaacaatacccttcaatctctaatgccttagttgcagctttcaagcgtgctcaagctcatcaacgacgaggctcgatcgagaatcagcagcaacctctcttagctgtgaaaatagagctagagcagcttataatatccattttagatgatcctagtgttagtagagtgatgagagaagctggtttctcaagtactcaagtgaaaagcaacgttgagcaagctgtttctttagaaatatgttctcaaaacagtgctcctgtaagtagtagcaagtctaaagaaagcaataacaataatagtgttttagcactttctcatactcaagtaggagctagaacaagctgtagatcatcaccaacaaccagtactacttctttagatccaattaggaaggaggatgtgatgagtgttatagagaatttaataaataaaagaaaaagaagtgttgtgattgtaggggagtgtcttgttagtttagaaggtgttgttaaaggagttatggacaaggttattaaaggagatgttcctgaagctttaaaagaagttaagtttatatcatttccattatcttctctaggtcatctctcttctagagtagaggtagaccaaaagcttgaagagcttaaagttcatattagaagctatttgagcaaaggggttgttttgaatttaggggatcttaagtgggttgtcgagtatagggctaataacttgagtccaatggagcatatgatcatggagattggcaagttagctagtggaatcagtgagaacaatgggaaattttggctaacgggaattgcaactttccaaacttacatgaagtgcaaatcgggaaatccatcacttgagactgtttggggtcttcatgctcttacaattccagcaggcagcttacgcttaagtctcatcaccgacagtaataaagttggtcaagatgggtctagatgttggattatgcttgaaggtgaagaagagaagcaacttacttgctgtgttgattgtacatcaaagtttgagaatgaggctagaagcttacaaagtagcacttctaatagtgactccacaaccacttctacccttcctgcatggcttcaacaatacaaaaatgagaaccagggcgttaataacaataatgatcaggattgtgtctcgatcaaagatctttgcaaaaagtggaactctatttgcagttcgatccaccaaaaaccctattcttctgagaaaaccattacattttcttctgtatcaccttcttcttttacttctagcttctcatatgaccaccaataccctaattttcatcacacctatcatcaacgcgactggccagtggttgaatccaagcaatcatggagagaccaccacttctgggttggttcagaaactgtcaacaagattaacagctgtatcagtattgaacccagtttgagaatgtacatcccagagcataatagagatcaatatcccaaaccaacaataccattttcatcgaatccgaattctactcctaactcaacttcttccagtgatgttatggaaatggagcatcttaacaagttcaaagaaatgaatgctgaaaacctgaaaatcttatgcaatgcattggagaaaaaggttacatggcagaaagatataatccctgacatcgcgagcacaatcttgcaatgcagatcaggcatggtaagaagaaaagggaaggtgacgagaaacagtagtaccgagcaagctaaagaagaaacttggttattgtttcaaggagttgatgtggaagctaaagaaaagatagctaaagaattggctaagctaatcttcggctcgcagaataacttcatttcaatttctttaagcagtttttcatctacaagagcagactcaacggaagactgtagaaacaaaagatcaagagatgaacaaagttgcagttatatagaaagatttgctgaagctgtatcaagcaatccacatagggtttttttggtggaagacgttgagcaagcagattattgctcgcaagttggtttcaaaagagcaatagaaagaggaagaataacaaatgttaagggtgaagaagttggtcttagtgatgccattatcattttgagctgtgaaagtttcagttcaagatcaagagcttgttctcctcctgtcaagcaaaaaacagatgactatattatttctcaagatcaagaagaagagaaaggtcaaggtgctaaaatggaggagtcaagtccctgtgtatcacttgatctgaatatatccattgatgatgacagtattgaggatcggtcaatcgatgatattggtcttcttgaatctgttgatagacgaattgttttcaaaatccaagagctacgattcatgtcataa

SEQ ID NO: 54 - protein, 882 aa, Ricinus communis
  [CDS]:1..2649 from SEQ ID NO 53
MRAGGCTVQQALTTEAATVVKQAVTLARRRGHAQVTPLHVANTMLSSSTGLLRTACLQSHSHPLQCKALELCFNVALNRLPASTSSPVLGTHAQQYPSISNALVAAFKRAQAHQRRGSIENQQQPLLAVKIELEQLIISILDDPSVSRVMREAGFSSTQVKSNVEQAVSLEICSQNSAPVSSSKSKESNNNNSVLALSHTQVGARTSCRSSPTTSTTSLDPIRKEDVMSVIENLINKRKRSVVIVGECLVSLEGVVKGVMDKVIKGDVPEALKEVKFISFPLSSLGHLSSRVEVDQKLEELKVHIRSYLSKGVVLNLGDLKWVVEYRANNLSPMEHMIMEIGKLASGISENNGKFWLTGIATFQTYMKCKSGNPSLETVWGLHALTIPAGSLRLSLITDSNKVGQDGSRCWIMLEGEEEKQLTCCVDCTSKFENEARSLQSSTSNSDSTTTSTLPAWLQQYKNENQGVNNNNDQDCVSIKDLCKKWNSICSSIHQKPYSSEKTITFSSVSPSSFTSSFSYDHQYPNFHHTYHQRDWPVVESKQSWRDHHFWVGSETVNKINSCISIEPSLRMYIPEHNRDQYPKPTIPFSSNPNSTPNSTSSSDVMEMEHLNKFKEMNAENLKILCNALEKKVTWQKDIIPDIASTILQCRSGMVRRKGKVTRNSSTEQAKEETWLLFQGVDVEAKEKIAKELAKLIFGSQNNFISISLSSFSSTRADSTEDCRNKRSRDEQSCSYIERFAEAVSSNPHRVFLVEDVEQADYCSQVGFKRAIERGRITNVKGEEVGLSDAIIILSCESFSSRSRACSPPVKQKTDDYIISQDQEEEKGQGAKMEESSPCVSLDLNISIDDDSIEDRSIDDIGLLESVDRRIVFKIQELRFMS

SEQ ID NO: 55 - DNA, 2487 bp, Vitis vinifera
  source 1..2487: /organism="Vitis vinifera" /mol_type="unassigned DNA"
  CDS 1..2487
  misc_feature 2364..2364: /note="s is g or c"
atgagagccggaggttgtacagtgcaacaggctctaactgcggaggcggccggcgtggtgaaacaagcagtaacccttgctaggcggcgtggacatgcccaagtcactcctctacatgtagccaacaccatgctcgccgctacaaacggcctgctccgaaccgcttgtcttcaatcccactcccaccccctccagtgcaaagccctagaactttgcttcaacgttgccctcaaccgccttccagcctccacatccagtcccatgctgggtcctcattcccaacatccttccatctccaacgcattggttgctgccttcaagcgagctcaggcccatcagcgacgcggctctattgagaaccagcagcaacctcttctagcagttaaaatagagctagagcagctcataatctctattttagatgatcctagtgtgagtagagtcatgagagaagctgggttctccagtacccaagtgaaaagcaatgtagagcaagctgtctccttggaaatctgctctcaagctccatccgtgagtagtaagtccaaggaaagtaaccttctagtcctgtcccagtctcctcccatgggtcaaattggagtaaagctaggcaaaccaacggtgccagatccagtcaggaatgaggatgtgatgagtgttagaggggtgatggacaaagttgacaagggagatgttccagaggctttgagagatgttaagcttataagccttcctccttcttctgacttttggacatcactccagagaagaggtccgaacagaaagctcggggagctcaagagccttgtgaagagttgcgtgggaagaggggttattttgtatttggaagatcttaaatggactacggattatagagctagttctagtgagcaagggaggaactattattgtcccgtggagcacatgatcatggagcttgggaaattggtttgtggatttggggagaacggaaggttttggctcatgggaatcgcaactttccaaacttactcgagatgtagaactggccatccatcgctggagactatttggagtctacatcctcttacaattcctgcaagcagcttggccttgagtctcatgcctgacagtgatctacaaagtcagttcagtagcaaaaaggctggaagtgggaccagtaattggcttatgcttgaaggtggagcggagaagcagcttacttgctgcgctgattgctcagccaatttcgagaatgaagctcgaagcataccaaccagcacttgtaacagtgattccacaacttcaacccttccaacatggctccaacagtacaaagatgagaacaaaaaactttcccgtaatgatcaggactgtgtagcagtcagagatctctgcaaaaaatggaattctatttgcagttctgcccacaaacaaccccactcatctgagaaaaccctaacattctcttctctttcaccttcttcctctacttctggcttttcatatgaccagcaatatcctaatttgcaccagacccaccaaggttggccagtggttgaacacaaacagtcctggagagacaatcatttctgggtttccgaagctcttaacaaaacctatgaacccagtttgagaatgtacattccggagcattctgatcgcaaatatgcgtcgaaccctaattctacccctaattcggcctcttcaagcgatgtcatggaaatggagtacgttcaaaggttcaaggagctcaacgctgagaacctgaacactctatgcaatgcattggagaaaaaggtcccatggcagaaagatataattcctgacatcgctagcacgatcttacaatgcaggtctggaatggtaagacgcaaaggaaaggtcaaaaatagcgagaccaaagaagaaacatggtttttcttccaaggcgttgatatggatgctaaagagaagattgcgagagaattggctagacttgttttcggctcccagaacaacttcgtttcaattgctctgagcagcttctcatctacaagggcggattcaacagaagatctccgaaataagagatcaagagatgagcaaagctgcagttacatcgagaggttcgctgaggcagtgggcagtaatccacaccgggtattcttagcggaagatgtggagcaagcggattactgctcccaaatgggtatcaaaagggccacagaaagaggaagaataaccaattcgaatggagaagaaatcagcctgagcgacgcaatcatcattttgagctgtgaaagcttcagctcgaggtctagagcctgctcacctccaatcaaacaaaaatcagatgagttcgaagaggagaaaggtggaggtgggggtgaggagataagcccstgtgtgtctttggatttgaatatttgcattgatgatgacggcgttgaggatgaatcaatcgacgacatcggacttcttgaatcagtggatagaaggattactttcaaaattcaggagttataa

SEQ ID NO: 56 - protein, 828 aa, Vitis vinifera
  [CDS]:1..2487 from SEQ ID NO 55
MRAGGCTVQQALTAEAAGVVKQAVTLARRRGHAQVTPLHVANTMLAATNGLLRTACLQSHSHPLQCKALELCFNVALNRLPASTSSPMLGPHSQHPSISNALVAAFKRAQAHQRRGSIENQQQPLLAVKIELEQLIISILDDPSVSRVMREAGFSSTQVKSNVEQAVSLEICSQAPSVSSKSKESNLLVLSQSPPMGQIGVKLGKPTVPDPVRNEDVMSVRGVMDKVDKGDVPEALRDVKLISLPPSSDFWTSLQRRGPNRKLGELKSLVKSCVGRGVILYLEDLKWTTDYRASSSEQGRNYYCPVEHMIMELGKLVCGFGENGRFWLMGIATFQTYSRCRTGHPSLETIWSLHPLTIPASSLALSLMPDSDLQSQFSSKKAGSGTSNWLMLEGGAEKQLTCCADCSANFENEARSIPTSTCNSDSTTSTLPTWLQQYKDENKKLSRNDQDCVAVRDLCKKWNSICSSAHKQPHSSEKTLTFSSLSPSSSTSGFSYDQQYPNLHQTHQGWPVVEHKQSWRDNHFWVSEALNKTYEPSLRMYIPEHSDRKYASNPNSTPNSASSSDVMEMEYVQRFKELNAENLNTLCNALEKKVPWQKDIIPDIASTILQCRSGMVRRKGKVKNSETKEETWFFFQGVDMDAKEKIARELARLVFGSQNNFVSIALSSFSSTRADSTEDLRNKRSRDEQSCSYIERFAEAVGSNPHRVFLAEDVEQADYCSQMGIKRATERGRITNSNGEEISLSDAIIILSCESFSSRSRACSPPIKQKSDEFEEEKGGGGGEEISPCVSLDLNICIDDDGVEDESIDDIGLLESVDRRITFKIQEL

SEQ ID NO: 57 - DNA, 2586 bp, Vitis vinifera
  source 1..2586: /organism="Vitis vinifera" /mol_type="unassigned DNA"
  CDS 1..2586
  misc_feature 57..57: /note="k is g or t"
  misc_feature 2066..2066: /note="m is a or c"
  misc_feature 2547..2547: /note="w is a or t"
  misc_feature 2560..2560: /note="w is a or t"
atgagagcaggagtttgcagtgtacagcaggttctaactgctgatgcagcaagcatkgtcaaacaagcagttacccttgctaggcggcgaggtcatgcccaagttactcctcttcatgtggccagtgtcatgcttgcttcctcctctggtcttctccgctctgcttgcctacgatcccactctcatcccctgcagtgcaaggctctggagctctgcttcaatgtggcgctcaaccgcctccctgcctcctcatcaagccccctattagctcctcattcctctcacccttccttgtccaatgccttggttgcagccttcaagcgtgcacaggctcaccaacgccgtgcctccatcgaaaaccagcaacaacccattctagctctcaaagtagagatagaacagctcataatctccatcctacatgacccaagtgttagtagagtcatgagagaggctggtttctctagtacccaattgagaaccaacatagaacaagctgtctctttggatgtttgttctcaaagccctgctgtgagtagcctttctaaggaaagtaacaaccctcctctaatactcggtactaatgtgtcccaatcttcaacatttattcagtttggagtaactctgaacaatccatttgacgaagctcaggaagaagatgtaaagagtcttttggacgcatttacaagcaaaagaaggagaaacactgttgttgtaggagagactctggccagtgctgagggtgtagttagagggctgatgaacaagtttgagagaggagatgtccctggagatctgaggtatgtgcagtttataagccttcctctcttctctttaaagaatctctccaaggaggttgaacagaagcttgtgaagctgaattgccttctgaaaagctatgtgtgtagaggggtggttttgtatttgggtgatctcaaatgggtctctgagtttgagtcaaattatggtgagaggagaaactactgctctcctgtggagcacataatcatggagctcggaagaatgatgtgtggaattggggatagaggacgaatgtggcttttggggactgcaaccttccaaacttacatgagatgcaaagcaggccatccttctttggagactatttgggaacttcatcctcttactattcctgttggcagcttgggcctcggtctcaatcttgacagcaatttgcagggccggttccaaagtaaggcatctggagatgggacttcttggtcacttcttcaaagtggagataagcaccttacttgcagcacaaattgctctgataattttgacaaagaatctcaaagtatagcatgcagttttcgcaatggcgagtccaccaccaccatcaccacttccaccagctcaagcttgccttcatggctccaaaaagagaaaagaagaaagatcatggacgatcaggaatgtgtccaagtcagagatctctgcaacaaatggaactcgttttgcagctcagtccacaaaaaggcccacagtactgagaaagccctgaatttttcttcaccatctccttcctccacttccatctcctcctatgaccaatgcagccctaatctgcaacagaaccacctaagttggccagccatcattgagccgaaaccacctctgaaagaacaccagttctggatatctgaaaatgttgatgaaggccttgaacccaagttcagtatgcacatagcagagagaaattttccaataccagatcttttatcaaatcctaactcttcccctaattcagcttcttctagtgaggcaatagaggatggagagggtctttatggtttcaaagagcttaatgcggagaatctgagaatcttatgcaatgcattggagagaagggttccatggcagaaggatatcattcctgaaatagcaagcaccattcttgaatgcaggtcaggaacactgagaggaaaaaacaagttgaagcagagggaggacaaggaagaaacttggctgctcttcttaggagttgactttcaaggcaaagagaagattgcaagggagatagctaagcttgtttttggctctcmgagcaagttcatctcaattggtctgagcagtttaggatcaacaagagctgattccaccgaggatttcctaagcaaacaagcaagagacgagcctgttggtagttatattgagaaattcgctgaagcggtgcatgagaatcctcacagagtgttcttcatagaagatgtggagcaactagattactcttctcaaatgggggttaagagaggaattgagagtggaagaatacaaattgctggaggtgaagcattttctcttgaggatgccatcatcatattcagttgtgaaagcttcagctcagtatcaagagccagctctcctccacccatggggctaaaatctgaagagaatgaggaaaaagaccgggataatgagttggagaagagaagcccatgtgtgtctctagatctgaatctttcagctgaagataatcaagaatatggacaaaactcggttgcagacactggggttctggattcwgtggacaggcagwttattttcaaaattcaagagttgtga

SEQ ID NO: 58 - protein, 861 aa, Vitis vinifera
  SITE 19..19: The Xaa at location 19 stands for Ile, or Met.
  SITE 689..689: The Xaa at location 689 stands for Gln, or Pro.
  SITE 854..854: The Xaa at location 854 stands for Ile, or Phe.
  [CDS]:1..2586 from SEQ ID NO 57
MRAGVCSVQQVLTADAASXVKQAVTLARRRGHAQVTPLHVASVMLASSSGLLRSACLRSHSHPLQCKALELCFNVALNRLPASSSSPLLAPHSSHPSLSNALVAAFKRAQAHQRRASIENQQQPILALKVEIEQLIISILHDPSVSRVMREAGFSSTQLRTNIEQAVSLDVCSQSPAVSSLSKESNNPPLILGTNVSQSSTFIQFGVTLNNPFDEAQEEDVKSLLDAFTSKRRRNTVVVGETLASAEGVVRGLMNKFERGDVPGDLRYVQFISLPLFSLKNLSKEVEQKLVKLNCLLKSYVCRGVVLYLGDLKWVSEFESNYGERRNYCSPVEHIIMELGRMMCGIGDRGRMWLLGTATFQTYMRCKAGHPSLETIWELHPLTIPVGSLGLGLNLDSNLQGRFQSKASGDGTSWSLLQSGDKHLTCSTNCSDNFDKESQSIACSFRNGESTTTITTSTSSSLPSWLQKEKRRKIMDDQECVQVRDLCNKWNSFCSSVHKKAHSTEKALNFSSPSPSSTSISSYDQCSPNLQQNHLSWPAIIEPKPPLKEHQFWISENVDEGLEPKFSMHIAERNFPIPDLLSNPNSSPNSASSSEAIEDGEGLYGFKELNAENLRILCNALERRVPWQKDIIPEIASTILECRSGTLRGKNKLKQREDKEETWLLFLGVDFQGKEKIAREIAKLVFGSXSKFISIGLSSLGSTRADSTEDFLSKQARDEPVGSYIEKFAEAVHENPHRVFFIEDVEQLDYSSQMGVKRGIESGRIQIAGGEAFSLEDAIIIFSCESFSSVSRASSPPPMGLKSEENEEKDRDNELEKRSPCVSLDLNLSAEDNQEYGQNSVADTGVLDSVDRQXIFKIQEL

SEQ ID NO: 59 - DNA, 2538 bp, Oryza sativa subsp. indica
  source 1..2538: /organism="Oryza sativa subsp. indica" /mol_type="unassigned DNA"
  CDS 1..2538
atgcgtgccggcggctgcgcagtgcagcaggcgctggcggcggaggcggcgggggtggtgaggcaggcggtgacgctggcgcggcggcgcggccacgcgcaggtcacgccgctccatgtcgccagcgccatgctctccgccgccggcctcctccgtgccgcctgcctccagtcccactcccacccgctccagtgcaaggccctcgagctctgcttcaacgtcgccctcaaccgcctccccaccgccggccccgccgccgccgccgccatcttccaccaccacccacaccaccccggcggcggcggcggtcaccaccccgcgctgtcgaacgcgctcgtcgccgcgttcaagcgcgcccaggcgcaccagcggcgtgggtccgtcgagggacagccgccgccgcagccgccgccgtcgccggtggtcgcgtccaaggtcgagctcgagcagctcatcatctccatcctcgatgaccccagcgtcagccgcgtcatgcgcgaggccggcttctccagctcgcaggtcaaggccaacgtcgagaaggccgtcgtcgcgtcgttggaccacgcgaacgcggcaggcggcggcggcggccacgcgggctctcccaactccggccatggagggaggcgcaaggagagctcatcatccagagcaagggtcgacgacgacgccatgcgcgtgctggactgcatggcgagcgggacgaaacggtgcgtggtggtcgtcggcggcgagggcgcggccgcggcggaggcggtggtgaaggcggtgatggacagggtgagcaaggcggagctgcaccaccggcacgagcgcctcaagaacctccagttcgtgcccctctccatcgcgtcgttccacggcgcgccgagggaggaggtggaggccaaggccagcgacctccgcgcgctcgtccgctccggctgcgccgccggcaagggcgtcgtgctcgtcctcgaggacctcgcctacgccgccgacgcgtgggccgccgcgtcgaacaccagacgccgcgccgccgccgccaccggcgggcagagctactgccccatggaacacgccgtgatggaggtgagcagcttggtgtccggcggcggcggcggcggcgagaggttctgggtgctagggttcgggagctaccaggtgtacatgaagtgcagggccgccgggcagccgccgctcgaggccgtctgggagctccaccccgtcgtcgtccccgacggcggcctcgccttgagcctcacctgcagtgaagcttcacaagctactcatcaagcggcggcgccaacagctgggtggcccttcgtcaatggcgccggcgaggcggcggcgacgacggcgagcccgaccattccgccgtggcttcgccggtatcaagatccagatcacgccacgccggcgagctgcggcaccggtttgcagatacaagatctgtggaatcccatgagaaatggatcagcaccacaccacacatccgagcttacattgagtttctcctctccatcaccttcttccatctcaggatataccagctgctacaacaacaacaacatgatgagctccaagccatggcaactcgaagcgaggcagccatggccaattcatggacatgaaggtcagagaatggccatggcatcatatcatgatcatcatccgttggatacaaaccctagcccagagtccaactcggtgtccaattcattggatggcggtgagacgaggcggcccaagttcatcgagctcaatgcagagaacctcaagatcttgtgcaatgcgctcgagagccgcgtcccgcaacatagcaacattgttccagacattgcgagcaccgtgctccaatgtcgatccggcatgaagaagatgaagttgaggcataaggagatcatcaaggcaagctcaactacttggttactattccaaggaagagatgttgatggtaagaaggccatggcacaagagctcgcaaagcttgtctttggttcatctaccgagttctcttccatctccttcgatgagctcacatcgccctactccgattctagctccggtgagctcaccctcaagaggcaaagatcagcagacagcaatgagcatagctttgcgcagagactatgtgaaattgtgagcaaaaacccacaccaggtcatagtgatcaatgacattgagcaacttgatcaagattcagaaattagtatcaagaaagcgattgcgaacggaagaatgagaggatgcaccggtgaagaagttgatttcgaggatgctatcatagtgttgagctatgaagaagaattcgattcgaggtctagggcttcctcctcccctcgggtcaagcagaggctcatgaacaataatgatgatgaagaaagtagcagcacggagaagggagataattcaccacaacgttttagcttggatttgaatgcatgtctcgaggatgaagaagaggatgaggggtttttgctaattgataatggtgtggggatgcatgatattgtggatggtgttttcttcttcgggttgatggcagatttctga

SEQ ID NO: 60 - protein, 845 aa, Oryza sativa subsp. indica
  [CDS]:1..2538 from SEQ ID NO 59
MRAGGCAVQQALAAEAAGVVRQAVTLARRRGHAQVTPLHVASAMLSAAGLLRAACLQSHSHPLQCKALELCFNVALNRLPTAGPAAAAAIFHHHPHHPGGGGGHHPALSNALVAAFKRAQAHQRRGSVEGQPPPQPPPSPVVASKVELEQLIISILDDPSVSRVMREAGFSSSQVKANVEKAVVASLDHANAAGGGGGHAGSPNSGHGGRRKESSSSRARVDDDAMRVLDCMASGTKRCVVVVGGEGAAAAEAVVKAVMDRVSKAELHHRHERLKNLQFVPLSIASFHGAPREEVEAKASDLRALVRSGCAAGKGVVLVLEDLAYAADAWAAASNTRRRAAAATGGQSYCPMEHAVMEVSSLVSGGGGGGERFWVLGFGSYQVYMKCRAAGQPPLEAVWELHPVVVPDGGLALSLTCSEASQATHQAAAPTAGWPFVNGAGEAAATTASPTIPPWLRRYQDPDHATPASCGTGLQIQDLWNPMRNGSAPHHTSELTLSFSSPSPSSISGYTSCYNNNNMMSSKPWQLEARQPWPIHGHEGQRMAMASYHDHHPLDTNPSPESNSVSNSLDGGETRRPKFIELNAENLKILCNALESRVPQHSNIVPDIASTVLQCRSGMKKMKLRHKEIIKASSTTWLLFQGRDVDGKKAMAQELAKLVFGSSTEFSSISFDELTSPYSDSSSGELTLKRQRSADSNEHSFAQRLCEIVSKNPHQVIVINDIEQLDQDSEISIKKAIANGRMRGCTGEEVDFEDAIIVLSYEEEFDSRSRASSSPRVKQRLMNNNDDEESSSTEKGDNSPQRFSLDLNACLEDEEEDEGFLLIDNGVGMHDIVDGVFFFGLMADF

SEQ ID NO: 61 - DNA, 2562 bp, Hordeum vulgare var. distichum
  source 1..2562: /organism="Hordeum vulgare var. distichum" /mol_type="unassigned DNA"
  CDS 1..2562
atgcgtgccggcggctgcgcggtgcagcaggccctggcgccggaggcggcgtccgttgtgaggcaggcggtcacactggcgcggcggcgcggccacgcgcaggtcaccccgctccacgtcgccaccgccatgctccttcccccggcgccggcggggctgctccgcgccgcctgcctccgctcccactcccacccgctccagtgcaaggccctcgagctctgcttcaacgtcgcgctcaaccgcctccccacctgcggacccgccgccatgttccacggcggcgcgcacatgcagcaccatcaccaccaccgcggcgccgccgaagcacccgcgctgtccaacgcgctcgtcgccgcgttcaagcgcgcgcaggcgcaccagcgccgcgggggcgccggggacggcgtccagcagacggccgcgccggtgctcgccgccaaggtcgagctggagcagctcatcgtctccatcctcgacgacccgagcgtgagccgcgtcatgcgcgaggccggattctccagctcgcaagtgaaggacaacgtcgagaaggccgtctcctcgtcgtcgccttccttggaacgcgcggctaacatgaagacaacgggctctattaaggagtccagagcgaagtcggctggcagcgacgacgccatgcgcgtgctagagtgcatggcgagcgggactaggcggtgcttggtcgtcgtcggcgagggcgcggaggcggcggtgaaggccgtgatggataaggtgagcaagtcggagcttcaccaccggcaccacgagcgcctcaagagcgtccagttcgtgccgctctccgtcacgtcgttccggcacgcggcgagggaggaggtggatgccaagaccagcgacctccgcgcgctcgtttgcgaggcccgcgccgccggtaagggcgtcgcgctcgtcgtagaggaccttgcctacgccgccgatgcctggcacaagagaagaggcgagcatgtgcacggcggacagtcacagtactactgccccgttgagcacgccgtcatggaggtgagcggcctggtgtccggcgactctggctccggcggcggaaggttctggctgctagggtttgcgagccgcacggtgttcatgaagtgcaggctcgggcagccatctttggaggccgtgtgggggatccaccccctcgtcgtgccagacggcggcagcctcgcgttaagcctcagctgcaccagtgaggcacagggtagccagcaagcaggaagatcgataacgggatggcccttggtgaacggcgcggccactaccggcgagagcgagctcacttggtgcgccaggacgccgtccccggagccaaacataccgtcatggtttcgccggtaccatgacccatatcagaccacaccgacgagcagcagtaccagtcttcaccagttacaagatctatggaaccccgtgcgcaattggtcagcgacgcaccaccatacatccgagctgacgttgagcttctcatcccccgcatcaccggcagcttcttccctctccggctacaacaacaccccgacgacgatgagctcgtccaagccatgtcagcccgagccgaggcaaccgtggccgccgtcgaaccaagggcacgaggacggtccggccacaagggcggaggcgattcgtgatcttcctcggtggcatagtaccgaaatcgctttcccggaatccttctctgctcaatccaactcacccaacgatcatggcggcggtacggcagatccggagcggcgacgccagaagttcacggaacttactgcagaaaacctcaagatcatgtgcggcacgctcgaggattgcgtgccggggcacattaaggatgtggcagcgggcgtcgccagtgctgtgctccaacgccggtccggcatggtgaggcagcgtgagacgcccaggccgagctcgacgacgtggctgctcttcaaagggagcgaccgcgacggcaagaaatccatggctttggagctcgcaaagctcgtctttggatcttacaatgatttcacgtccatctcatcagctggctgcaccccggttcactccagttccagctctggcgagcgttccggcaagaggcagagatcgccggactacgagcatggctgcgcacaaaggttttacgacacgatccacgagaaccctcgccgggtggtgatgatcgatgatgtcgagcaaatgagccttggatctgagatcggcatcaagaaagcgattgccagtggaagggtgagaggttgcaatggcgttgagaccagtctcgaggatgccatcatagtgctgagctgcgaagcattcgactcgagatctagggcttcctctcctcgggtcatcaagcagaaggtcatatgcgacgaggaagatagtggcggcgtggagaagggggtgacgaagccgccatgtttcagcttggatttgaacgagtgcgcctccggtgatgatgaaggacatcaggaggaagagggattggatagtgacgtggagatctgtgatgttgtggatggtgttttcttcttccgactaccgggagatttgtcacattag

SEQ ID NO: 62 - protein, 853 aa, Hordeum vulgare var. distichum
  [CDS]:1..2562 from SEQ ID NO 61
MRAGGCAVQQALAPEAASVVRQAVTLARRRGHAQVTPLHVATAMLLPPAPAGLLRAACLRSHSHPLQCKALELCFNVALNRLPTCGPAAMFHGGAHMQHHHHHRGAAEAPALSNALVAAFKRAQAHQRRGGAGDGVQQTAAPVLAAKVELEQLIVSILDDPSVSRVMREAGFSSSQVKDNVEKAVSSSSPSLERAANMKTTGSIKESRAKSAGSDDAMRVLECMASGTRRCLVVVGEGAEAAVKAVMDKVSKSELHHRHHERLKSVQFVPLSVTSFRHAAREEVDAKTSDLRALVCEARAAGKGVALVVEDLAYAADAWHKRRGEHVHGGQSQYYCPVEHAVMEVSGLVSGDSGSGGGRFWLLGFASRTVFMKCRLGQPSLEAVWGIHPLVVPDGGSLALSLSCTSEAQGSQQAGRSITGWPLVNGAATTGESELTWCARTPSPEPNIPSWFRRYHDPYQTTPTSSSTSLHQLQDLWNPVRNWSATHHHTSELTLSFSSPASPAASSLSGYNNTPTTMSSSKPCQPEPRQPWPPSNQGHEDGPATRAEAIRDLPRWHSTEIAFPESFSAQSNSPNDHGGGTADPERRRQKFTELTAENLKIMCGTLEDCVPGHIKDVAAGVASAVLQRRSGMVRQRETPRPSSTTWLLFKGSDRDGKKSMALELAKLVFGSYNDFTSISSAGCTPVHSSSSSGERSGKRQRSPDYEHGCAQRFYDTIHENPRRVVMIDDVEQMSLGSEIGIKKAIASGRVRGCNGVETSLEDAIIVLSCEAFDSRSRASSPRVIKQKVICDEEDSGGVEKGVTKPPCFSLDLNECASGDDEGHQEEEGLDSDVEICDVVDGVFFFRLPGDLSH

SEQ ID NO: 63 - DNA, 2589 bp, Vitis vinifera
  source 1..2589: /organism="Vitis vinifera" /mol_type="unassigned DNA"
  CDS 1..2589
atgagagcaggagtttgcagtgtacagcaggttctaactgctgatgcagcaagcatggtcaaacaagcagttacccttgctaggcggcgaggtcatgcccaagttactcctcttcatgtggccagtgtcatgcttgcttcctcctctggtcttctccgctctgcttgcctacgatcccactctcatcccctgcagtgcaaggctctggagctctgcttcaatgtggcgctcaaccgcctccctgcctcctcatcaagccccctattagctcctcattcctctcacccttccttgtccaatgccttggttgcagccttcaagcgtgcacaggctcaccaacgccgtgcctccatcgaaaaccagcaacaacccattctagctctcaaagtagagatagaacagctcataatctccatcctacatgacccaagtgttagtagagtcatgagagaggctggtttctctagtacccaattgagaaccaacatagaacaagctgtctctttggatgtttgttctcaaagccctgctgtgagtagcctgtctaaggaaagtaacaaccctcctctaatactcggtactaatgtgtcccaatcttcaacatttattcagtttggagtaactctgaacaatccatttgacgaagctcaggaagaagatgtaaagagtcttttggacgcatttacaagcaaaagaaggagaaacactgttgttgtaggagagactctggccagtgctgagggtgtagttagagggctgatgaacaagtttgagagaggagatgtccctggagatctgaggtatgtgcagtttataagccttcctctcttctctttaaagaatctctccaaggaggaggttgaacagaagcttgtgaagctgacttgccttctgaaaagctatgtgtgtagaggggtggttttgtatttgggtgatctcaaatgggtctctgagtttgagtcaaattatggtgagaggagaaactactgctctcctgtggagcacataatcatggagctcggaagaatgatgtgtggaattggggatagaggacgaatgtggcttttggggactgcaaccttccaaacttacatgagatgcaaagcaggccatccttctttggagactatttgggaacttcatcctcttactattcctgttggcagcttgggcctcggtctcaatcttgacagcaatttgcagggccggttccaaagtaaggcatctggagatgggacttcttggtcactacttcaaagtggagataagcaccttacttgcagcacaaattgctctgataattttgacaaagaatctcaaagtatagcatgcagttttcgcaatggcgagtccaccaccaccatcaccacttccaccagctcaagcttgccttcatggctccaaaaagagaaaagaagaaagatcatggacgatcaggaatgtgtccaagtcagagatctctgcaacaaatggaactcgttttgcagctcagtccacaaaaaggcccacagtactgagaaagccctgaatttttcttcaccatctccttcctccacttccatctcctcctatgaccaatgcagccctaatctgcaacagaaccacctaagttggccagccatcattgagccgaaaccacctctgaaagaacaccagttctggatatctgaaaatgttgatgaaggccttgaacccaagttcagtatgcacatagcagagagaaattttccaataccagatcttttatcaaatcctaactcttcccctaattcagcttcttctagtgaggcaatagaggatggagagggtctttatggtttcaaagagcttaatgcggagaatctgagaatcttatgcaatgcattggagagaagggttccatggcagaaggatatcattcctgaaatagcaagcaccattcttgaatgcaggtcaggaacactgagaggaaaaaacaagttgaagcagagggaggacaaggaagaaacttggctgctcttcttaggagttgactttcaaggcaaagacaagattgcaagggagatagctaagcttgtttttggctctcagagcaagttcatctcaattggtctgagcagtttaggatcaacaagagctgattccaccgaggatttcctaagcaaacaagcaagagacgagcctgttggtagttatattgagaaattcgctgaagcggtgcatgagaatcctcacagagtgttcttcatagaagatgtggagcaactagattactcttctcaaatgggggttaagagaggaattgagagtggaagaatacaaattgctggaggtgaagcattttctcttgaggatgccatcatcatattcagttgtgaaagcttcagctcagtatcaagagccagctctcctccacccatggggctaaaatctgaagagaatgaggaaaaagaccgggataatgagttggagaagagaagcccatgtgtgtctctagatctgaatctttcagctgaagataatcaagaatatggacaaaactcggttgcagacactggggttctagattctgtggacaggcagtttattttcaaaattcaagagttgtga

SEQ ID NO: 64 - protein, 862 aa, Vitis vinifera
  [CDS]:1..2589 from SEQ ID NO 63
MRAGVCSVQQVLTADAASMVKQAVTLARRRGHAQVTPLHVASVMLASSSGLLRSACLRSHSHPLQCKALELCFNVALNRLPASSSSPLLAPHSSHPSLSNALVAAFKRAQAHQRRASIENQQQPILALKVEIEQLIISILHDPSVSRVMREAGFSSTQLRTNIEQAVSLDVCSQSPAVSSLSKESNNPPLILGTNVSQSSTFIQFGVTLNNPFDEAQEEDVKSLLDAFTSKRRRNTVVVGETLASAEGVVRGLMNKFERGDVPGDLRYVQFISLPLFSLKNLSKEEVEQKLVKLTCLLKSYVCRGVVLYLGDLKWVSEFESNYGERRNYCSPVEHIIMELGRMMCGIGDRGRMWLLGTATFQTYMRCKAGHPSLETIWELHPLTIPVGSLGLGLNLDSNLQGRFQSKASGDGTSWSLLQSGDKHLTCSTNCSDNFDKESQSIACSFRNGESTTTITTSTSSSLPSWLQKEKRRKIMDDQECVQVRDLCNKWNSFCSSVHKKAHSTEKALNFSSPSPSSTSISSYDQCSPNLQQNHLSWPAIIEPKPPLKEHQFWISENVDEGLEPKFSMHIAERNFPIPDLLSNPNSSPNSASSSEAIEDGEGLYGFKELNAENLRILCNALERRVPWQKDIIPEIASTILECRSGTLRGKNKLKQREDKEETWLLFLGVDFQGKDKIAREIAKLVFGSQSKFISIGLSSLGSTRADSTEDFLSKQARDEPVGSYIEKFAEAVHENPHRVFFIEDVEQLDYSSQMGVKRGIESGRIQIAGGEAFSLEDAIIIFSCESFSSVSRASSPPPMGLKSEENEEKDRDNELEKRSPCVSLDLNLSAEDNQEYGQNSVADTGVLDSVDRQFIFKIQEL

SEQ ID NO: 65 - DNA, 2484 bp, Vitis vinifera
  source 1..2484: /organism="Vitis vinifera" /mol_type="unassigned DNA"
  CDS 1..2484
atgagagccggaggttgtacagtgcaacaggctctaactgcggaggcggccggcgtggtgaaacaagcagtaacccttgctaggcggcgtggacatgcccaagtcactcctctacatgtagccaacaccatgctcgccgctacaaacggcctgctccgaaccgcttgtcttcaatcccactcccaccccctccagtgcaaagccctagaactttgcttcaacgttgccctcaaccgccttccagcctccacatccagtcccatgctgggtcctcattcccaacatccttccatctccaacgcattggttgctgccttcaagcgagctcaggcccatcagcgacgcggctctattgagaaccagcagcaacctcttctagcagttaaaatagagctagagcagctcataatctctattttagatgatcctagtgtgagtagagtcatgagagaagctgggttctccagtacccaagtgaaaagcaatgtagagcaagctgtctccttggaaatctgctctcaagctccatccgtgagtagtaagtccaaggaaaatccagtcaggaatgaggatgtgatgagtgtaatagagaatctgatgaataaaaggaggaaaaatactgtgattgttggagagtgtctggcgactatcgagggtgtagttagaggggtgatggacaaagttgacaagggagatgttccagaggctttgagagatgttaagcttataagccttcctctcttctcttttggacatcactccagagaagaggtcgaacagaagctcggggagctcaagagccttgtgaagagttgcgtgggaagaggggttattttgtatttggaagatcttaaatggactacggattatagagctagttctagtgagcaagggaggaactattattgtcccgtggagcacatgatcatggagcttgggaaattggtttgtggatttggggagaacggaaggttttggctcatgggaatcgcaactttccaaacttactcgagatgtagaactggccatccatcgctggagactatttggagtctacatcctcttacaattcctgcaagcagcttggccttgagtctcatgcctgacagtgatctacaaagtcagttcagtagcaaaaaggctggaagtgggaccagtaattggcttatgcttgaaggtggagcggagaagcagcttacttgctgcgctgattgctcagccaatttcgagaatgaagctcgaagcataccaaccagcacttgtaacagtgattccacaacttcaacccttccaacatggctccaacagtacaaagatgagaacaaaaaactttcccgtaatgatcaggactgtgtagcagtcagagatctctgcaaaaaatggaattctatttgcagttctgcccacaaacaaccccactcatctgagaaaaccctaacattctcttctctttcaccttcttcctctacttctggcttttcatatgaccagcaatatcctaatttgcaccagacccaccaaggttggccagtggttgaacacaaacagtcctggagagacaatcatttctgggtttccgaagctcttaacaaaacctatgaacccagtttgagaatgtacattccggagcattctgatcgcaaatatgcgtcgaaccctaattctacccctaattcggcctcttcaagcgatgtcatggaaatggagtacgttcaaaggttcaaggagctcaacgctgagaacctgaacactctatgcaatgcattggagaaaaaggtcccatggcagaaagatataattcctgacatcgctagcacgatcttacaatgcaggtctggaatggtaagacgcaaaggaaaggtcaaaaatagcgagaccaaagaagaaacatggtttttcttccaaggcgttgatatggatgctaaagagaagattgcgagagaattggctagacttgttttcggctcccagaacaacttcgtttcaattgctctgagcagcttctcatctacaagggcggattcaacagaagatctccgaaataagagatcaagagatgagcaaagctgcagttacatcgagaggttcgctgaggcagtgggcagtaatccacaccgggtattcttagcggaagatgtggagcaagcggattactgctcccaaatgggtatcaaaagggccacagaaagaggaagaataaccaattcgaatggagaagaaatcagcctgagcgacgcaatcatcattttgagctgtgaaagcttcagctcgaggtctagagcctgctcacctccaatcaaacaaaaatcagatgagttcgaagaggagaaaggtggaggtgggggtgaggagataagcccatgtgtgtctttggatttgaatatttgcattgatgatgacggcgttgaggatgaatcaatcgacgacatcggacttcttgaatcagtggatagaaggattactttcaaaattcaggagttataa

SEQ ID NO: 66 - protein, 827 aa, Vitis vinifera
  [CDS]:1..2484 from SEQ ID NO 65
MRAGGCTVQQALTAEAAGVVKQAVTLARRRGHAQVTPLHVANTMLAATNGLLRTACLQSHSHPLQCKALELCFNVALNRLPASTSSPMLGPHSQHPSISNALVAAFKRAQAHQRRGSIENQQQPLLAVKIELEQLIISILDDPSVSRVMREAGFSSTQVKSNVEQAVSLEICSQAPSVSSKSKENPVRNEDVMSVIENLMNKRRKNTVIVGECLATIEGVVRGVMDKVDKGDVPEALRDVKLISLPLFSFGHHSREEVEQKLGELKSLVKSCVGRGVILYLEDLKWTTDYRASSSEQGRNYYCPVEHMIMELGKLVCGFGENGRFWLMGIATFQTYSRCRTGHPSLETIWSLHPLTIPASSLALSLMPDSDLQSQFSSKKAGSGTSNWLMLEGGAEKQLTCCADCSANFENEARSIPTSTCNSDSTTSTLPTWLQQYKDENKKLSRNDQDCVAVRDLCKKWNSICSSAHKQPHSSEKTLTFSSLSPSSSTSGFSYDQQYPNLHQTHQGWPVVEHKQSWRDNHFWVSEALNKTYEPSLRMYIPEHSDRKYASNPNSTPNSASSSDVMEMEYVQRFKELNAENLNTLCNALEKKVPWQKDIIPDIASTILQCRSGMVRRKGKVKNSETKEETWFFFQGVDMDAKEKIARELARLVFGSQNNFVSIALSSFSSTRADSTEDLRNKRSRDEQSCSYIERFAEAVGSNPHRVFLAEDVEQADYCSQMGIKRATERGRITNSNGEEISLSDAIIILSCESFSSRSRACSPPIKQKSDEFEEEKGGGGGEEISPCVSLDLNICIDDDGVEDESIDDIGLLESVDRRITFKIQEL

SEQ ID NO: 67 - DNA, 2631 bp, Oryza sativa
  source 1..2631: /organism="Oryza sativa" /mol_type="unassigned DNA"
  CDS 1..2631
atgagggccggggggtgcacggtgcagcaggcgctgacggcggaggcggccgccgtggtgaagcaggcggtgaccctggcgcggcggaggggcaacgcgcaggtgacgccgctgcacgtggcgagcgcgatgctggcgccgccgggggggctcctccgcgcggcgtgcctccggtcgcactcccacccgctgcagtgcaaggccctggagctctgcttcaacgtggcgctcaaccgcctcccggcctccgccgccgtcgcctcgtcgccgctgctcggcggccacgggcacggccaccacggccactactacccgccgtcgctctccaacgcgctcgtcgcggcgttcaagcgggcgcaggcgcaccagcggcgcgggtccgtggagacccagcagcagccggtgctcgccgtgaagatcgagctggagcagctcgtcgtctccatcctcgacgaccccagcgtcagccgcgtcatgcgggaggccggcttctccagcacccaggtcaaggccaacgtggagcaggcgtgcagcaccaccacggccaccagcgcgccaccgaaccaaaaccctaaccctagctgcaccggcgccgcagccaccgccaccgccaccaccagcccggctcatcctccggagatcaaagccaaactgccactgctcgacatgctggcgcgcgacgaggacatcgccgcggtgctcgactgccttgccccggcagcggctggcggccggggcggcggcggcagcaggaggagggtcgtcgtcgtcgccgagagcacggccgccgcggaggccacggcgcgcgccgccgtggacagggtcaggagaggggaggcgaagcagcacgacgcgctgcgtggcgcgcaggtggtcaacctccgcgtgtcgtcgttccgcgacatgccgagggaggaggcggagcggcggctcgccgagctccggtgcctcgtgaagagccgcggcgcgcgggtgctcctcgtcgtcgaggacctcaagtgggcggccgacttctgggccgccgcgcacaccggcgcgaggagggtcggcagcggcggcggcggctactactgctctgtcgagcacgtcgtcaccgaggtgcgcgccctggcgtcgtgcgacggcggcatctggctcgtcgggttcgggacgtaccagacgtacatgaagtgcagggcggggcatccgtcgctggagagcatgtgggggctccagacgctcgccgtccccgccggcagcctcgcgctgagcctcacctgcgccttcgacgacagcgcgctgggcgcagtcaatcagtccatgaaagcgagccctcacaccaccgatgggaaccgcccggcgccgtcttgctggccgcttttgggcggcagccacctcctctccagatgctgcggcggcgactgctccgccgcgacgacgacgcacgagcacgacaccaaggcgtcgttgccccgctccttcgtgtcgtcgtcgagcctcccttcttggctccagcattgccgcgaccagcagctgcaggagtcgacacatttcgcggatcttggcaagacatggggatccatctgcggcaagccgtctcagcggatgacgctgcatttctcggcgccggtgtcgccggcgtcctccatctcctcctacgagcacggccacggccaccagcagcagcagcaccagcctcaccactcgtggcttctcgccgacctcgacgccaagcacccatggaagcccaagcgcgaggacgacgacgacgagaaggccaagtcgcacgacgactgctccggcgcctccaatggctcggtggaggtggagtgccgttccaggttcaaggagctcaacgccgagaacctgaagctcctgtgcgccgcgctggagaaggaggtgccgtggcagaaggagatcgtcccggaggtggcgagcgccgtcctccagtgcaggtccgggatcgccaagcggcgggacaggtcgaggtcgacggaggcgaaggaggagacgtggctcttcttcctcggaggcgacgcgcacggcaaggagagggtggcgagggagctcgccggcctcgtcttcgggtcacgcaagagcttcctctccgtcaagctcggcgcctcctcctcctcgccgtccgcgtcgggctccaccgaggatcaccaccggagcaagcggccgcggacgacgacgaggtcgtcggcgagcgaggcctacctcgagcggctctacgacgccgtctcggagaacccgcaccgcgtcatcctcatcgaggacgtcgagcagggcgaccatcgctggcaggtgggcgtcaaggaggccatcgacagaggggttctccggagccaggccggcgacgaggtcggcgtgggcgacgccatcatcatcctgagctgcgagagcttcgaggcgaggtctagagctggctcgccgctgatgaacaagaagatgaaggtggagaaagaggaagccaacacaagtgatcatgatcacaaattagaaatcgaatcaggcgtcccctcttcttgcttcgatttgaaccttgacatggagagcgatcaagcagcagatgagctcagctccggtgatgtctgtctgctcacggcggtcgaccgggtgctgctcttcagaaggcaggatgaaatgtaa

SEQ ID NO: 68 - protein, 876 aa, Oryza sativa
  [CDS]:1..2631 from SEQ ID NO 67
MRAGGCTVQQALTAEAAAVVKQAVTLARRRGNAQVTPLHVASAMLAPPGGLLRAACLRSHSHPLQCKALELCFNVALNRLPASAAVASSPLLGGHGHGHHGHYYPPSLSNALVAAFKRAQAHQRRGSVETQQQPVLAVKIELEQLVVSILDDPSVSRVMREAGFSSTQVKANVEQACSTTTATSAPPNQNPNPSCTGAAATATATTSPAHPPEIKAKLPLLDMLARDEDIAAVLDCLAPAAAGGRGGGGSRRRVVVVAESTAAAEATARAAVDRVRRGEAKQHDALRGAQVVNLRVSSFRDMPREEAERRLAELRCLVKSRGARVLLVVEDLKWAADFWAAAHTGARRVGSGGGGYYCSVEHVVTEVRALASCDGGIWLVGFGTYQTYMKCRAGHPSLESMWGLQTLAVPAGSLALSLTCAFDDSALGAVNQSMKASPHTTDGNRPAPSCWPLLGGSHLLSRCCGGDCSAATTTHEHDTKASLPRSFVSSSSLPSWLQHCRDQQLQESTHFADLGKTWGSICGKPSQRMTLHFSAPVSPASSISSYEHGHGHQQQQHQPHHSWLLADLDAKHPWKPKREDDDDEKAKSHDDCSGASNGSVEVECRSRFKELNAENLKLLCAALEKEVPWQKEIVPEVASAVLQCRSGIAKRRDRSRSTEAKEETWLFFLGGDAHGKERVARELAGLVFGSRKSFLSVKLGASSSSPSASGSTEDHHRSKRPRTTTRSSASEAYLERLYDAVSENPHRVILIEDVEQGDHRWQVGVKEAIDRGVLRSQAGDEVGVGDAIIILSCESFEARSRAGSPLMNKKMKVEKEEANTSDHDHKLEIESGVPSSCFDLNLDMESDQAADELSSGDVCLLTAVDRVLLFRRQDEM

SEQ ID NO: 69 - DNA, 2514 bp, Arabidopsis thaliana
  source 1..2514: /organism="Arabidopsis thaliana" /mol_type="unassigned DNA"
  CDS 1..2514
atgagagctggaggctgcacggtggagcaagccctcacggcggatgctgcaaacgtggtgaaacaagccatggggttggctagacggagaggacatgctcaggtcacacctctccatgtagctagcaccatgctctctgctcccacgggtttacttagaacagcttgtctccaatctcacactcaccctcttcaatgcagagccctcgagctctgcttcaacgtagctttgaaccgcctcccgacctctacagggagtcctatgttaggggttccaacttcccctttcccttctatctccaacgctctcggtgcagctttcaaacgcgcacaagctcaccaacgacgtggttctatagagagccagcaacaaccgatcttagcagtcaagatcgaagtggagcagctcataatatctatcctcgatgatcctagcgtgagtagagtgatgagagaagctggtttctcgagtcctcaagtgaagactaaagtcgagcaagctgtttctttagagatttgctctaaaacaacctcttcgagtaaacccaaagaggggaagttattaactcctgtcaggaacgaggatgttatgaacgttatcaacaatcttgtcgacaaaaagagaagaaatttcgtgatcgtaggagagtgtttagccactattgacggagttgtgaagacggtgatggaaaaagtcgacaaaaaagacgtgcccgaggttttaaaagacgtaaagttcataactttatcgttctcatcgttcgggcaaccaagtagagccgatgtggaacgtaagctagaggagctagaggccgatgtggaacgtaagctagaggagctagaggccgatgtggaacgtaagctagaggagctagagacactcgtgaagagctgtgtagggaaaggagtgattctaaatctgggagatctaaactggttcgtagagtcaagaaccagaggttcttcactgtataacaacaacgatagctactgtgttgtggagcatatgataatggagattgggaagttggcttgtgggttagtcatgggagatcatggaaggttttggttaatgggtcttgcgacttcacagacttacgtgagatgcaagtctggtcaaccctcgcttgaatctctctggtgtctcactactcttactattccggcgactagtaatagtctccggttgagtctcgtctccgagagtgagcttgaagtcaagaaatcagagaacgtgtctctccagctgcagcaatcatcggatcagctcagtttctgtgaggaatgttccgtcaagtttgaatcggaagctcgattcttaaagagtagcaatagcaatgtaaccactgtagcattaccggcatggcttcagcagtataagaaggagaatcaaaatagtcacactgattcagattctattaaggaacttgtggtgaagtggaactcaatctgtgattcaatccacaaaagaccatctctaaaaacactcacactctcttctcctacttcttccttttctggttccactcaaccttcaatcagtactcttcatcatcttcaaaccaacggtgattggcccgtgatcgagacaaacacgcatcgtcatcattctgttgtccatgagacatctcacttaagactgttcattccagaacatgacagcgagcaaaagactgagctagtctgttcgaatcctaattctacaatgaactctgaagcctcttcaagcgatgcaatggagttggaacatgcctcttcaaggtttaaagagatgaatgcagaaaacctagcaactttatgtgctgccttggaaagcaaggtaccgtggcaaaaggatttagtcccggagttagccaaaacagtcttgaaatgcaggtcaggatcgagtacgaggaagattaacggaaacgaggataaaaaagaagatacatggatgttcttccaaggtcttgatgtagatgctaaagagaagatcgctagagaattggccaaactcgtgtttggatcgcaagacagctttgtctctatctgtttgagtagtttctcgtcgacaagatcggattctgcagaagatttgaggaacaagaggttgagagatgaacaaagcctgagttacatagagagattctcggaagctgtttcgttggatccaaatagagtgatcttagttgaagatattgagcaagctgattatttgtctcaagtgggtttcaagagagctgttgagagaggaagagtttgtaattcgagtggtgaagaagcttcgcttaaagacgcgattgtgatcttgagctgtgaaagatttcgttcaagatcaagagcttgttctcctcctagtaaccagaaatcggacggttcagatcaacctgaggacaagaatgttgctacttgtgttgcacttgatctaaacctatctattgatagtgcgtacgtttgtgaagaagaatcatgtgatgagattggcttactcgaagcggtagatgcacggtttcatttcaagtgttcatcaacataa

SEQ ID NO: 70 - protein, 837 aa, Arabidopsis thaliana
  [CDS]:1..2514 from SEQ ID NO 69
MRAGGCTVEQALTADAANVVKQAMGLARRRGHAQVTPLHVASTMLSAPTGLLRTACLQSHTHPLQCRALELCFNVALNRLPTSTGSPMLGVPTSPFPSISNALGAAFKRAQAHQRRGSIESQQQPILAVKIEVEQLIISILDDPSVSRVMREAGFSSPQVKTKVEQAVSLEICSKTTSSSKPKEGKLLTPVRNEDVMNVINNLVDKKRRNFVIVGECLATIDGVVKTVMEKVDKKDVPEVLKDVKFITLSFSSFGQPSRADVERKLEELEADVERKLEELEADVERKLEELETLVKSCVGKGVILNLGDLNWFVESRTRGSSLYNNNDSYCVVEHMIMEIGKLACGLVMGDHGRFWLMGLATSQTYVRCKSGQPSLESLWCLTTLTIPATSNSLRLSLVSESELEVKKSENVSLQLQQSSDQLSFCEECSVKFESEARFLKSSNSNVTTVALPAWLQQYKKENQNSHTDSDSIKELVVKWNSICDSIHKRPSLKTLTLSSPTSSFSGSTQPSISTLHHLQTNGDWPVIETNTHRHHSVVHETSHLRLFIPEHDSEQKTELVCSNPNSTMNSEASSSDAMELEHASSRFKEMNAENLATLCAALESKVPWQKDLVPELAKTVLKCRSGSSTRKINGNEDKKEDTWMFFQGLDVDAKEKIARELAKLVFGSQDSFVSICLSSFSSTRSDSAEDLRNKRLRDEQSLSYIERFSEAVSLDPNRVILVEDIEQADYLSQVGFKRAVERGRVCNSSGEEASLKDAIVILSCERFRSRSRACSPPSNQKSDGSDQPEDKNVATCVALDLNLSIDSAYVCEEESCDEIGLLEAVDARFHFKCSST

SEQ ID NO: 71 - DNA, 2754 bp, Oryza sativa subsp. japonica
  source 1..2754: /organism="Oryza sativa subsp. japonica" /mol_type="unassigned DNA"
  CDS 1..2754
atgagagctggggggtgcacggtgcagcaggcgctgacggcggaggcggcggctgtggtgaagcaggcggtgagcctggcgcggcggcgcgggaacgcgcaggtgacgccgctgcacgtggcgagcgcgatgctgcaggcggcgggggcggcgccggcgccggggctcctccgcgcggcgtgcctccggtcgcactcccacccgctgcagtgcaaggccctcgagctctgcttcaacgtcgccctcaaccgcctcccggcgtcggcgggggcgtcgccgctgctcggccatggccacggcgtcggcgtctactacccgccgtcgctgtcgaacgcgctcgtcgccgcgttcaagcgcgcccaggcgcaccagcggcggggctccgtcgagacgcagcagcagccggtgctcgccgtcaagatcgagctcgagcagctcgtcatctccatcctcgacgaccccagcgtcagccgcgtcatgcgcgaggccggcttctccagcacccaggtcaaggccaacgtcgagcaagccgtctcttcctccatggaagccgccaccaccaagccccaaaaccctaaccctagcagcagctcgcctccgccggcggctcatcaagaggcgaaacctagtagatgcatcgatcaggtggtggtgcgggaggaggacgtcgcggccatcctggactgcctggcgacgcggagcaagaagcgggtcatggtggtcgccgagtgcgccgccgcggccgaggcggcggcgcgggcggccgtggacaggatcaggcgcggcgaggcgaggcagcacgcgcaggcgcaggtggtcaccctcgccgtgtcccggttccgcggcgcgccgagggaggaggcggagcggcggctggcggagctccggtgcgccgtcaggggcggcggcggccgcgcggtggtgctcgtcgtggaggacctcgcgtgggcggccgagttctgggccgggaggaggccgccgccatcctcctgcggcgcaggcgccggcggctactactactgcgccgtggagcacgccgtcgccgaggtgcgcgccctggcgtgcggcggcggcggcggcggcggcggcgtttggctcgtcgggcacggcacgtaccagacgaacatccggtgccggacggggcacccctcgctggagactctctggggcctccacacgctcgccgtccccgccggcagcctcgccctcagcctcacctgcgccgacgccgacgccgccgccgacgacgacgacagtggtgcaatggcagcagcagcagtcaatcaccagtcagccaaaggcgcgaacggatcgacgtcgccgtcgccttgcctgtcacttttggacgctgctgcagcaggtggcgcctgcagctccgggcagctggcggtgatggccgccgccgtctccggcgcctactgcggcggcgattgcgccgccgcgacgaaagcactgctgccacagtcagtcgtcttcatgccgccgtcggcgacgacgaccaccaccaccatccctccatggctgcaccattgccgcgatcaggagcctgcagctcatatgaagaaatggatgtcggcgcatggcggctcgccgtcgcgcaggacggcgctgaacatctcgtccacggcggtgtcgccgtgctcctccgtctcgtcctacgagcagtacacccggttgcaccagccgtaccagccatggctcgtcgccgacgacgacgacgaagccgaagagacgaagcatccatacatcgccggcgatggcggcgctggtaggcttgtgccggcggcggccaaggtggtgatcaagtccgacgactcgagcgcctccaatggctccgtggaggtggagtggcggcggcccaggttcaaggaggtgagcgccgagaacctcaaggtgctctgcggcgcgctggagaaggaggtgccgtggcagaaggtgatcgtgccggagatcgccagcacggtgctccggtgccggtcgggcatggcggcgcccgccatggcgaggaggtcgagctcttgctcgagctccaaggagcacacgtggatgctcttcctcggcggcgacgcggatggcaagttgagggtggcgagggagctggcgagcctcgtcttcggctcgtccaagagcttcgtgtccatcggcggcgccgccaacgcgtcgccgccgccgtcgtcatcgtcgtcgtctccggcgcggtcgtcgggctccaccgagcagccgcaccggagcaagcggccatgggcggagacgacgacgacgacgacgagcgggcgggaccaggaccacctcgaggcgctctacgacgccgtgcgcgacaacccgcggcgcgtcattctgatggagcgcgtcgaccgggccgacgcgcggtgccacgacggcatcagggacgccatcgagcgcggcgtggtgcggagccgcggcggcggcggcgaggaggccttcctcggcgacgccatcgtcgtcctcagctgcgagagcctcaacccaagttcgacgacgccggcgaagaaggccaagacggagtacagcgtggagaagctcgaccaggatggtgatgatcaccatggcaaggaagccgtcgcggcggcggcgtcgccgtcttgctttgatctgaacatgagcatggacgacgacgacgaggcggcggaggagcgttgcaccggcgaagaagaagaagcaggccatcatcatcatcagctgctgctcaaggcagtagacagggtgctgttcttcagatcaattggggaataa

SEQ ID NO: 72 - protein, 917 aa, Oryza sativa subsp. japonica
  [CDS]:1..2754 from SEQ ID NO 71
MRAGGCTVQQALTAEAAAVVKQAVSLARRRGNAQVTPLHVASAMLQAAGAAPAPGLLRAACLRSHSHPLQCKALELCFNVALNRLPASAGASPLLGHGHGVGVYYPPSLSNALVAAFKRAQAHQRRGSVETQQQPVLAVKIELEQLVISILDDPSVSRVMREAGFSSTQVKANVEQAVSSSMEAATTKPQNPNPSSSSPPPAAHQEAKPSRCIDQVVVREEDVAAILDCLATRSKKRVMVVAECAAAAEAAARAAVDRIRRGEARQHAQAQVVTLAVSRFRGAPREEAERRLAELRCAVRGGGGRAVVLVVEDLAWAAEFWAGRRPPPSSCGAGAGGYYYCAVEHAVAEVRALACGGGGGGGGVWLVGHGTYQTNIRCRTGHPSLETLWGLHTLAVPAGSLALSLTCADADAAADDDDSGAMAAAAVNHQSAKGANGSTSPSPCLSLLDAAAAGGACSSGQLAVMAAAVSGAYCGGDCAAATKALLPQSVVFMPPSATTTTTTIPPWLHHCRDQEPAAHMKKWMSAHGGSPSRRTALNISSTAVSPCSSVSSYEQYTRLHQPYQPWLVADDDDEAEETKHPYIAGDGGAGRLVPAAAKVVIKSDDSSASNGSVEVEWRRPRFKEVSAENLKVLCGALEKEVPWQKVIVPEIASTVLRCRSGMAAPAMARRSSSCSSSKEHTWMLFLGGDADGKLRVARELASLVFGSSKSFVSIGGAANASPPPSSSSSSPARSSGSTEQPHRSKRPWAETTTTTTSGRDQDHLEALYDAVRDNPRRVILMERVDRADARCHDGIRDAIERGVVRSRGGGGEEAFLGDAIVVLSCESLNPSSTTPAKKAKTEYSVEKLDQDGDDHHGKEAVAAAASPSCFDLNMSMDDDDEAAEERCTGEEEEAGHHHHQLLLKAVDRVLFFRSIGE

SEQ ID NO: 73 - DNA, 53 bp, Artificial sequence
  source 1..53: /organism="Artificial sequence" /note="primer" /mol_type="unassigned DNA"
ggggacaagtttgtacaaaaaagcaggcttaaacaatgagagctggaggctgc

SEQ ID NO: 74 - DNA, 50 bp, Artificial sequence
  source 1..50: /organism="Artificial sequence" /note="primer" /mol_type="unassigned DNA"
ggggaccactttgtacaagaaagctgggtgcatacgtgcatgctgttagt

SEQ ID NO: 75 - protein, 1086 aa, Artificial sequence
  consensus sequence
  VARIANT 3..3: Xaa in position 3 is any amino acid
  VARIANT 5..5: Xaa in position 5 is any amino acid
  VARIANT 7..7: Xaa in position 7 is any amino acid
  VARIANT 10..10: Xaa in position 10 is any amino acid
  VARIANT 12..12: Xaa in position 12 is any amino acid
  VARIANT 14..16: Xaa in position 14 to 16 is any amino acid
  VARIANT 19..20: Xaa in position 19 to 20 is any amino acid
  VARIANT 22..22: Xaa in position 22 is any amino acid
  VARIANT 26..26: Xaa in position 26 is any amino acid
  VARIANT 29..29: Xaa in position 29 is any amino acid
  VARIANT 43..44: Xaa in position 43 to 44 is any amino acid
  VARIANT 47..49: Xaa in position 47 to 49 is any amino acid
  VARIANT 50..67: Xaa in position 50 to 67 is any or no amino acid
  VARIANT 72..72: Xaa in position 72 is any amino acid
  VARIANT 76..76: Xaa in position 76 is any amino acid
  VARIANT 78..79: Xaa in position 78 to 79 is any amino acid
  VARIANT 102..115: Xaa in position 102 to 115 is any amino acid
  VARIANT 116..129: Xaa in position 116 to 129 is any or no amino acid
  VARIANT 131..132: Xaa in position 131 to 132 is any amino acid
  VARIANT 151..152: Xaa in position 151 to 152 is any amino acid
  VARIANT 153..155: Xaa in position 153 to 155 is any or no amino acid
  VARIANT 157..157: Xaa in position 157 is any amino acid
  VARIANT 159..160: Xaa in position 159 to 160 is any amino acid
  VARIANT 161..172: Xaa in position 161 to 172 is any or no amino acid
  VARIANT 175..175: Xaa in position 175 is any amino acid
  VARIANT 177..177: Xaa in position 177 is any amino acid
  VARIANT 179..179: Xaa in position 179 is any amino acid
  VARIANT 183..183: Xaa in position 183 is any amino acid
  VARIANT 204..205: Xaa in position 204 to 205 is any amino acid
  VARIANT 208..209: Xaa in position 208 to 209 is any amino acid
  VARIANT 210..211: Xaa in position 210 to 211 is any or no amino acid
  VARIANT 214..214: Xaa in position 214 is any amino acid
  VARIANT 218..239: Xaa in position 218 to 239 is any amino acid
  VARIANT 240..276: Xaa in position 240 to 276 is any or no amino acid
  VARIANT 278..280: Xaa in position 278 to 280 is any amino acid
  VARIANT 282..291: Xaa in position 282 to 291 is any amino acid
  VARIANT 292..303: Xaa in position 292 to 303 is any or no amino acid
  VARIANT 305..306: Xaa in position 305 to 306 is any amino acid
  VARIANT 307..307: Xaa in position 307 is any or no amino acid
  VARIANT 309..311: Xaa in position 309 to 311 is any amino acid
  VARIANT 312..313: Xaa in position 312 to 313 is any or no amino acid
  VARIANT 315..324: Xaa in position 315 to 324 is any amino acid
  VARIANT 325..326: Xaa in position 325 to 326 is any or no amino acid
  VARIANT 328..331: Xaa in position 328 to 331 is any amino acid
  VARIANT 332..336: Xaa in position 332 to 336 is any or no amino acid
  VARIANT 338..338: Xaa in position 338 is any amino acid
  VARIANT 339..348: Xaa in position 339 to 348 is any or no amino acid
  VARIANT 350..351: Xaa in position 350 to 351 is any amino acid
  VARIANT 353..357: Xaa in position 353 to 357 is any amino acid
  VARIANT 358..359: Xaa in position 358 to 359 is any or no amino acid
  VARIANT 361..361: Xaa in position 361 is any amino acid
  VARIANT 363..367: Xaa in position 363 to 367 is any amino acid
  VARIANT 368..389: Xaa in position 368 to 389 is any or no amino acid
  VARIANT 391..392: Xaa in position 391 to 392 is any amino acid
  VARIANT 395..399: Xaa in position 395 to 399 is any amino acid
  VARIANT 400..402: Xaa in position 400 to 402 is any or no amino acid
  VARIANT 405..405: Xaa in position 405 is any amino acid
  VARIANT 407..409: Xaa in position 407 to 409 is any amino acid
  VARIANT 412..423: Xaa in position 412 to 423 is any amino acid
  VARIANT 424..440: Xaa in position 424 to 440 is any or no amino acid
  VARIANT 443..444: Xaa in position 443 to 444 is any amino acid
  VARIANT 447..449: Xaa in position 447 to 449 is any amino acid
  VARIANT 451..453: Xaa in position 451 to 453 is any amino acid
  VARIANT 455..461: Xaa in position 455 to 461 is any amino acid
  VARIANT 462..471: Xaa in position 462 to 471 is any or no amino acid
  VARIANT 474..474: Xaa in position 474 is any amino acid
  VARIANT 476..481: Xaa in position 476 to 481 is any amino acid
  VARIANT 483..484: Xaa in position 483 to 484 is any amino acid
  VARIANT 486..487: Xaa in position 486 to 487 is any amino acid
  VARIANT 488..488: Xaa in position 488 is any or no amino acid
  VARIANT 490..490: Xaa in position 490 is any amino acid
  VARIANT 495..496: Xaa in position 495 to 496 is any amino acid
  VARIANT 498..498: Xaa in position 498 is any amino acid
  VARIANT 500..504: Xaa in position 500 to 504 is any amino acid
  VARIANT 506..506: Xaa in position 506 is any amino acid
  VARIANT 508..508: Xaa in position 508 is any amino acid
  VARIANT 509..510: Xaa in position 509 to 510 is any or no amino acid
  VARIANT 512..512: Xaa in position 512 is any amino acid
  VARIANT 516..535: Xaa in position 516 to 535 is any amino acid
  VARIANT 536..614: Xaa in position 536 to 614 is any or no amino acid
  VARIANT 616..616: Xaa in position 616 is any amino acid
  VARIANT 619..629: Xaa in position 619 to 629 is any amino acid
  VARIANT 630..645: Xaa in position 630 to 645 is any or no amino acid
  VARIANT 647..658: Xaa in position 647 to 658 is any amino acid
  VARIANT 659..677: Xaa in position 659 to 677 is any or no amino acid
  VARIANT 679..680: Xaa in position 679 to 680 is any amino acid
  VARIANT 682..693: Xaa in position 682 to 693 is any amino acid
  VARIANT 694..699: Xaa in position 694 to 699 is any or no amino acid
  VARIANT 701..727: Xaa in position 701 to 727 is any amino acid
  VARIANT 728..764: Xaa in position 728 to 764 is any or no amino acid
  VARIANT 766..775: Xaa in position 766 to 775 is any amino acid
  VARIANT 776..786: Xaa in position 776 to 786 is any or no amino acid
  VARIANT 788..788: Xaa in position 788 is any amino acid
  VARIANT 790..791: Xaa in position 790 to 791 is any amino acid
  VARIANT 796..797: Xaa in position 796 to 797 is any amino acid
  VARIANT 800..800: Xaa in position 800 is any amino acid
  VARIANT 804..805: Xaa in position 804 to 805 is any amino acid
  VARIANT 808..809: Xaa in position 808 to 809 is any amino acid
  VARIANT 811..811: Xaa in position 811 is any amino acid
  VARIANT 812..812: Xaa in position 812 is any or no amino acid
  VARIANT 814..815: Xaa in position 814 to 815 is any amino acid
  VARIANT 816..816: Xaa in position 816 is any or no amino acid
  VARIANT 820..821: Xaa in position 820 to 821 is any amino acid
  VARIANT 823..823: Xaa in position 823 is any amino acid
  VARIANT 828..837: Xaa in position 828 to 837 is any amino acid
  VARIANT 838..848: Xaa in position 838 to 848 is any or no amino acid
  VARIANT 851..852: Xaa in position 851 to 852 is any amino acid
  VARIANT 854..854: Xaa in position 854 is any amino acid
  VARIANT 856..856: Xaa in position 856 is any amino acid
  VARIANT 858..860: Xaa in position 858 to 860 is any amino acid
  VARIANT 862..866: Xaa in position 862 to 866 is any amino acid
  VARIANT 870..870: Xaa in position 870 is any amino acid
  VARIANT 876..878: Xaa in position 876 to 878 is any amino acid
  VARIANT 880..880: Xaa in position 880 is any amino acid
  VARIANT 883..889: Xaa in position 883 to 889 is any amino acid
  VARIANT 890..904: Xaa in position 890 to 904 is any or no amino acid
  VARIANT 906..906: Xaa in position 906 is any amino acid
  VARIANT 908..910: Xaa in position 908 to 910 is any amino acid
  VARIANT 911..912: Xaa in position 911 to 912 is any or no amino acid
  VARIANT 915..915: Xaa in position 915 is any amino acid
  VARIANT 917..923: Xaa in position 917 to 923 is any amino acid
  VARIANT 924..933: Xaa in position 924 to 933 is any or no amino acid
  VARIANT 935..937: Xaa in position 935 to 937 is any amino acid
  VARIANT 939..941: Xaa in position 939 to 941 is any amino acid
  VARIANT 947..950: Xaa in position 947 to 950 is any amino acid
  VARIANT 952..952: Xaa in position 952 is any amino acid
  VARIANT 953..954: Xaa in position 953 to 954 is any or no amino acid
  VARIANT 956..956: Xaa in position 956 is any amino acid
  VARIANT 958..962: Xaa in position 958 to 962 is any amino acid
  VARIANT 964..966: Xaa in position 964 to 966 is any amino acid
  VARIANT 969..970: Xaa in position 969 to 970 is any amino acid
  VARIANT 972..977: Xaa in position 972 to 977 is any amino acid
  VARIANT 979..982: Xaa in position 979 to 982 is any amino acid
  VARIANT 983..984: Xaa in position 983 to 984 is any or no amino acid
  VARIANT 986..986: Xaa in position 986 is any amino acid
  VARIANT 990..991: Xaa in position 990 to 991 is any amino acid
  VARIANT 992..992: Xaa in position 992 is any or no amino acid
  VARIANT 994..994: Xaa in position 994 is any amino acid
  VARIANT 997..998: Xaa in position 997 to 998 is any amino acid
  VARIANT 999..999: Xaa in position 999 is any or no amino acid
  VARIANT 1001..1026: Xaa in position 1001 to 1026 is any amino acid
  VARIANT 1027..1043: Xaa in position 1027 to 1043 is any or no amino acid
  VARIANT 1048..1060: Xaa in position 1048 to 1060 is any amino acid
  VARIANT 1061..1076: Xaa in position 1061 to 1076 is any or no amino acid
  VARIANT 1078..1079: Xaa in position 1078 to 1079 is any amino acid
  VARIANT 1082..1085: Xaa in position 1082 to 1085 is any amino acid
MRXGXCXVQXQXLXXXAAXXVXQAVXLAXRRGHAQVTPLHVAXXMLXXXXXXXXXXXXXXXXXXXXXGLLRXACLXSXXHSHPLQCKALELCFNVALNRLPXXXXXXXXXXXXXXXXXXXXXXXXXXXXPXXSNALVAAFKRAQAHQRRGXXXXXQXQXXXXXXXXXXXXXXLAXKXEXEQLXISILDDPSVSRVMREAGFSSXXVKXXXXVEXAVSXXXXXXXXXXXXXXXXXXXXXXXXXXXXXXXXXXXXXXXXXXXXXXXXXXXXXXXXXXXDXXXVXXXXXXXXXXXXXXXXXXXXXXVXXXEXXXXXEXXXXXXXXXXXXGXXXXXXXXXLXXXXXXXXXXXSXXFXXXXXXXEXEXXXXXXXXXXXXXXXXXXXXXXXXXXXLXXLVXXXXXXXXGVXLXXXDLXXXXXXXXXXXXXXXXXXXXXXXXXXXXXYCXXEHXXXEXXXLXXXXXXXXXXXXXXXXXWLXGXXXXXXYXXCXXXGXPSLEXXWXLXXXXXPXGXXXLXLSLXXXXXXXXXXXXXXXXXXXXXXXXXXXXXXXXXXXXXXXXXXXXXXXXXXXXXXXXXXXXXXXXXXXXXXXXXXXXXXXXXXXXXXXXXXXXXXXXXXXPXWLXXXXXXXXXXXXXXXXXXXXXXXXXXXWXXXXXXXXXXXXXXXXXXXXXXXXXXXXXXXSXXSXXXXXXXXXXXXXXXXXXWXXXXXXXXXXXXXXXXXXXXXXXXXXXXXXXXXXXXXXXXXXXXXXXXXXXXXXXXXXXXXXXXSXXXXXXXXXXXXXXXXXXXXXFXEXXAENLXXLCXALEXXVPXXKXXIXXXIASXXLXCRSGXXXXXXXXXXXXXXXXXXXXXTWXXFXGXDXXXKXXXXXELAXLVFGSXXXFXSIXXXXXXXXXXXXXXXXXXXXXXSXEXXXXXKRXRXXXXXXXXXXXXXXXXXRXXXAXXXNPHRVXXXXDXXXQXDXXXXXGXXXAIXXGXXXXXXGXXXXXXLXDAIXXXSXCEXXXSXXXXXXXXXXXXXXXXXXXXXXXXXXXXXXXXXXXXXXXXXXXLDLNXXXXXXXXXXXXXXXXXXXXXXXXXXXXXLXXVDXXXXF

SEQ ID NO: 76 - protein, 42 aa, Artificial sequence
  protein pattern
  VARIANT 2..2: Xaa in position 2 is Ala, Gly, Leu or Val
  VARIANT 4..5: Xaa in position 4 to 5 is any or no amino acid
  VARIANT 7..7: Xaa in position 7 is any amino acid
  VARIANT 8..9: Xaa in position 8 to 9 is any or no amino acid
  VARIANT 12..12: Xaa in position 12 is Ile, Met or Val
  VARIANT 13..13: Xaa in position 13 is Ile or Val
  VARIANT 17..17: Xaa in position 17 is Asp or His
  VARIANT 27..27: Xaa in position 27 is Asp or Glu
  VARIANT 29..29: Xaa in position 29 is Asp or Gly
  VARIANT 31..31: Xaa in position 31 is Asn or Ser
  VARIANT 33..33: Xaa in position 33 is Pro, Ser or Thr
  VARIANT 34..34: Xaa in position 34 is any amino acid
  VARIANT 35..35: Xaa in position 35 is Leu or Val
  VARIANT 36..36: Xaa in position 36 is Lys or Arg
  VARIANT 37..37: Xaa in position 37 is Ala, Asn, Ser or Thr
  VARIANT 38..38: Xaa in position 38 is any amino acid
  VARIANT 39..39: Xaa in position 39 is Ile or Val
  VARIANT 41..41: Xaa in position 41 is any amino acid
  VARIANT 42..42: Xaa in position 42 is Ala or Glu
AXKXXIXXXQLXXSILXDPSVSRVMRXAXFXSXXXXXXXEXX

SEQ ID NO: 77 - protein, 21 aa, Artificial sequence
  protein pattern
  VARIANT 2..2: Xaa in position 2 is any amino acid
  VARIANT 4..4: Xaa in position 4 is any amino acid
  VARIANT 5..5: Xaa in position 5 is Asn, Ser or Thr
  VARIANT 6..6: Xaa in position 6 is Ala, Asp, Glu, Ser or Thr
  VARIANT 10..11: Xaa in position 10 to 11 is any amino acid
  VARIANT 13..13: Xaa in position 13 is Cys or Ser
  VARIANT 14..14: Xaa in position 14 is any amino acid
  VARIANT 17..18: Xaa in position 17 to 18 is any amino acid
  VARIANT 19..19: Xaa in position 19 is Glu, Lys or Arg
  VARIANT 20..20: Xaa in position 20 is any amino acid
  VARIANT 21..21: Xaa in position 21 is Pro, Ser or Thr
FXEXXXENLXXLXXALXXXXX

SEQ ID NO: 78 - protein, 38 aa, Artificial sequence
  protein pattern
  VARIANT 3..3: Xaa in position 3 is Phe, Leu or Met
  VARIANT 4..4: Xaa in position 4 is Phe or Leu
  VARIANT 6..6: Xaa in position 6 is any amino acid
  VARIANT 8..8: Xaa in position 8 is any amino acid
  VARIANT 9..9: Xaa in position 9 is Asp, Gly or Asn
  VARIANT 10..11: Xaa in position 10 to 11 is any amino acid
  VARIANT 12..12: Xaa in position 12 is Ala, Asp or Gly
  VARIANT 13..13: Xaa in position 13 is Lys or Arg
  VARIANT 14..15: Xaa in position 14 to 15 is any amino acid
  VARIANT 16..16: Xaa in position 16 is Ile, Met or Val
  VARIANT 17..17: Xaa in position 17 is Ala, Cys or Ser
  VARIANT 18..18: Xaa in position 18 is any amino acid
  VARIANT 22..22: Xaa in position 22 is any amino acid
  VARIANT 23..23: Xaa in position 23 is Leu or Val
  VARIANT 28..30: Xaa in position 28 to 30 is any amino acid
  VARIANT 31..31: Xaa in position 31 is Phe or Val
  VARIANT 32..32: Xaa in position 32 is any amino acid
  VARIANT 33..33: Xaa in position 33 is Ala, Cys, Ser or Thr
  VARIANT 34..36: Xaa in position 34 to 36 is any amino acid
  VARIANT 37..37: Xaa in position 37 is Ala, Asp, Gly or Ser
  VARIANT 38..38: Xaa in position 38 is Ala, Asp, Glu, Gly, Asn, Ser or Thr
TWXXFXGXXXXXXXXXXXELAXXVFGSXXXXXXXXXXX

SEQ ID NO: 79 - protein, 19 aa, Artificial sequence
  protein pattern
  VARIANT 2..2: Xaa in position 2 is any amino acid
  VARIANT 3..3: Xaa in position 3 is any or no amino acid
  VARIANT 5..5: Xaa in position 5 is any or no amino acid
  VARIANT 7..7: Xaa in position 7 is any amino acid
  VARIANT 8..8: Xaa in position 8 is Leu or Val
  VARIANT 9..9: Xaa in position 9 is Glu or Gly
  VARIANT 12..12: Xaa in position 12 is any amino acid
  VARIANT 13..13: Xaa in position 13 is Trp or Tyr
  VARIANT 14..15: Xaa in position 14 to 15 is any amino acid
  VARIANT 16..16: Xaa in position 16 is Asp or Glu
  VARIANT 17..18: Xaa in position 17 to 18 is any amino acid
  VARIANT 19..19: Xaa in position 19 is Ala, Ser or Thr
GXXVXLXXXDLXXXXXXXX

SEQ ID NO: 80 - protein, 14 aa, Artificial sequence
  protein pattern
  VARIANT 2..5: Xaa in position 2 to 5 is any or no amino acid
  VARIANT 7..7: Xaa in position 7 is any amino acid
  VARIANT 8..8: Xaa in position 8 is Pro or Thr
  VARIANT 9..9: Xaa in position 9 is Phe, Ile, Leu or Val
  VARIANT 10..10: Xaa in position 10 is Ala, Thr or Val
  VARIANT 11..11: Xaa in position 11 is Ile or Val
  VARIANT 13..13: Xaa in position 13 is Ala, Asp or Val
  VARIANT 14..14: Xaa in position 14 is Gly, Ser or Thr
EXXXXLXXXXXPXX

SEQ ID NO: 81 - protein, 11 aa, Artificial sequence
  protein pattern
  VARIANT 2..2: Xaa in position 2 is any amino acid
  VARIANT 4..4: Xaa in position 4 is Ala, Ser or Thr
  VARIANT 6..7: Xaa in position 6 to 7 is Ile or Val
  VARIANT 8..8: Xaa in position 8 is any amino acid
  VARIANT 9..9: Xaa in position 9 is Cys, Gly, Asn or Ser
  VARIANT 10..10: Xaa in position 10 is any amino acid
  VARIANT 11..11: Xaa in position 11 is Ala, Glu or Gln
LXDXIXXXXXX

SEQ ID NO: 82 - DNA, 2194 bp, Oryza sativa
  source 1..2194: /organism="Oryza sativa" /mol_type="unassigned DNA"
aatccgaaaagtttctgcaccgttttcaccccctaactaacaatatagggaacgtgtgctaaatataaaatgagaccttatatatgtagcgctgataactagaactatgcaagaaaaactcatccacctactttagtggcaatcgggctaaataaaaaagagtcgctacactagtttcgttttccttagtaattaagtgggaaaatgaaatcattattgcttagaatatacgttcacatctctgtcatgaagttaaattattcgaggtagccataattgtcatcaaactcttcttgaataaaaaaatctttctagctgaactcaatgggtaaagagagagattttttttaaaaaaatagaatgaagatattctgaacgtattggcaaagatttaaacatataattatataattttatagtttgtgcattcgtcatatcgcacatcattaaggacatgtcttactccatcccaatttttatttagtaattaaagacaattgacttatttttattatttatcttttttcgattagatgcaaggtacttacgcacacactttgtgctcatgtgcatgtgtgagtgcacctcctcaatacacgttcaactagcaacacatctctaatatcactcgcctatttaatacatttaggtagcaatatctgaattcaagcactccaccatcaccagaccacttttaataatatctaaaatacaaaaaataattttacagaatagcatgaaaagtatgaaacgaactatttaggtttttcacatacaaaaaaaaaaagaattttgctcgtgcgcgagcgccaatctcccatattgggcacacaggcaacaacagagtggctgcccacagaacaacccacaaaaaacgatgatctaacggaggacagcaagtccgcaacaaccttttaacagcaggctttgcggccaggagagaggaggagaggcaaagaaaaccaagcatcctccttctcccatctataaattcctccccccttttcccctctctatataggaggcatccaagccaagaagagggagagcaccaaggacacgcgactagcagaagccgagcgaccgccttctcgatccatatcttccggtcgagttcttggtcgatctcttccctcctccacctcctcctcacagggtatgtgcctcccttcggttgttcttggatttattgttctaggttgtgtagtacgggcgttgatgttaggaaaggggatctgtatctgtgatgattcctgttcttggatttgggatagaggggttcttgatgttgcatgttatcggttcggtttgattagtagtatggttttcaatcgtctggagagctctatggaaatgaaatggtttagggatcggaatcttgcgattttgtgagtaccttttgtttgaggtaaaatcagagcaccggtgattttgcttggtgtaataaagtacggttgtttggtcctcgattctggtagtgatgcttctcgatttgacgaagctatcctttgtttattccctattgaacaaaaataatccaactttgaagacggtcccgttgatgagattgaatgattgattcttaagcctgtccaaaatttcgcagctggcttgtttagatacagtagtccccatcacgaaattcatggaaacagttataatcctcaggaacaggggattccctgttcttccgatttgctttagtcccagaattttttttcccaaatatcttaaaaagtcactttctggttcagttcaatgaattgattgctacaaataatgcttttatagcgttatcctagctgtagttcagttaataggtaatacccctatagtttagtcaggagaagaacttatccgatttctgatctccatttttaattatatgaaatgaactgtagcataagcagtattcatttggattattttttttattagctctcaccccttcattattctgagctgaaagtctggcatgaactgtcctcaattttgttttcaaattcacatcgattatctatgcattatcctcttgtatctacctgtagaagtttctttttggttattccttgactgcttgattacagaaagaaatttatgaagctgtaatcgggatagttatactgcttgttcttatgattcatttcctttgtgcagttcttggtgtagcttgccactttcaccagcaaagttc

SEQ ID NO: 83 - protein, 15 aa, Artificial sequence
  protein pattern
  VARIANT 6..6: Xaa in position 6 is Lys or Arg
  VARIANT 13..13: Xaa in position 13 is Asn or Ser
HPLQCXALELCFXVA

SEQ ID NO: 84 - protein, 15 aa, Artificial sequence
  protein pattern
  VARIANT 4..4: Xaa in position 4 is Gly or Val
  VARIANT 7..7: Xaa in position 7 is Leu or Phe
NALXAAXKRAQAHQR

SEQ ID NO: 85 - protein, 15 aa, Artificial sequence
  protein pattern
  VARIANT 14..14: Xaa in position 14 is Gly or Ser
LDDPSVSRVMREAXF

SEQ ID NO: 86 - DNA, 2445 bp, Artificial Sequence
  source 1..2445: /organism="Artificial Sequence" /note="CLP Variant" /mol_type="unassigned DNA"
atgagagccggcgcctgctgcgccgagaacatcctgaccgccgacgccgccaacggcgtgaagcaggccatgggcctggccagaagaagaggccacgcccaggtgacccccctgcacgtggccagcaccatgctgagcgcccccaccggcctgctgagaaccgccagcatgaacagccacaccagacccgcccagtgcagagccctggagggctgcttcaacgccgccctgaaccacctgcccaccacctgcgtgagccccgccgtgctggtgcccaccagcccctggcccagcggcagcaacgccctgggcgccgccttcaagagagcccaggcccaccagagaagaggcagcatcgagagccagcagcagcccctggccctggtgaagatcgaggtggagcagctgatcatcagcatcctggacgaccccagcgtgagcagagtgatgagagaggccggcttcagcagcccccaggtgaagaccaaggtggagcaggccgtgagcctggagatctgcacccactgcaccagcaccagcaagcccaaggaggtgagaatgatgacccccgtgagacaggacgacggcatgcaggtgctgaacaacatcgccgaccacaagcacaagaacttcggcatcgtgatcgacaccctggccagcatcgacggcgtggtgaagtgcgtgatggacaaggtggagagacacgaggtgcccgaggtggccaaggacgtgagattcatcagcctgagcttcagcagcttcggcaaccccagccacgccgaggtggaccacaagctggaggagctggagaccctgctgagaagctgcgtgggcagagccgtgatcatcaacctggtggacggccagtggttcgtggacagcagatgcagaggcagcagcctgtaccagcagaacgacagctactgcgtggtggaccacctggtgatggagatcctgagactggcctgcctgctggtgctgggcgaccacggcagattctggatgatcggcctggtgaccagcaacacctgggtgaagagcaagaccatgaaccccagcctggagagcctgtggtgcctgaccaccctgagcatccccgccaccagccagaccctgcacctgagcggcgtgagcgacagcgaggccgagggcaagagaagcgaccaggtgagcctgcagatgcagcagagcagcgacaacctgagcttcaccgaggagtgcagcgtgaagtacgacagcgagatgcacttcctgaagagcaccaacagcaacgtgtgcagcctgggcctgcccgcctacggccagaactacaagcacgagaacaacaacagccacaccgacagcgagtgcatcaaggagctggtggtgaagtggaacaccctgtgcgacagcatcagaagacaccccagcctgaagaccctgaccctgtgcagccccaccagcaccttcagcggctgcacccagcccaccatcagcaccatcagaagaatccagagccagggcgactaccccgtggccgagaccaacaccaagagacaccacagcctggtgcacgactgcacccacatgaagctgttcgtgcccgaccacgacagcgagcagaagaccgagctggtgaccagcaacccccagtgcaccatgaacaccgacgccagcaccagcgacggcatggaggtggaccacgccagcagcagataccacgacatgcaggccgaccagctggccaccggctgcgccgccctggagagcaaggtgccctggcagaaggacctggtgcccgaggtggcccacaccgccctgaagtgccacagcatcagcagcaccaagaagatcaacggccaggaggagaagaaggaggactgctacatgttctaccagatgctggacgtggacggcaaggagaaggtggccagagacctgctgaagggcatctggggcagccaggactgctgggtgaccgccaccctgagcacctggagcaccaccagaagcgactgcgccgaggacctgagacagagaaagctgcacgaggagcagagcatcagcttcgccgacagattcagcgacgccgtgagcctggaccccaaccacatcatcatggccgaggagatcgaccaggccgactacctgagccaggtgatgttcaagagagccgtggagagaggcagagtgtgcaacagcaccggcgaggaggccagcggccacgagggcatcgccatcggctgctgcgaccactaccacagcaagaccagagcctgcagcccccccagccagcagaagagcgagggcagcgacaaccccgaggacaagaacgccgccacctgcggcgccctggagctgaacctgagcatcgacagcgcctggatctgcgacgaggactgctgcgacgagatcggcctgctggaggtgctggacgcccacttcaagttcaagtgcaccagcacc

SEQ ID NO: 87 - protein, 815 aa, Artificial Sequence
  CLP variant
MRAGACCAENILTADAANGVKQAMGLARRRGHAQVTPLHVASTMLSAPTGLLRTASMNSHTRPAQCRALEGCFNAALNHLPTTCVSPAVLVPTSPWPSGSNALGAAFKRAQAHQRRGSIESQQQPLALVKIEVEQLIISILDDPSVSRVMREAGFSSPQVKTKVEQAVSLEICTHCTSTSKPKEVRMMTPVRQDDGMQVLNNIADHKHKNFGIVIDTLASIDGVVKCVMDKVERHEVPEVAKDVRFISLSFSSFGNPSHAEVDHKLEELETLLRSCVGRAVIINLVDGQWFVDSRCRGSSLYQQNDSYCVVDHLVMEILRLACLLVLGDHGRFWMIGLVTSNTWVKSKTMNPSLESLWCLTTLSIPATSQTLHLSGVSDSEAEGKRSDQVSLQMQQSSDNLSFTEECSVKYDSEMHFLKSTNSNVCSLGLPAYGQNYKHENNNSHTDSECIKELVVKWNTLCDSIRRHPSLKTLTLCSPTSTFSGCTQPTISTIRRIQSQGDYPVAETNTKRHHSLVHDCTHMKLFVPDHDSEQKTELVTSNPQCTMNTDASTSDGMEVDHASSRYHDMQADQLATGCAALESKVPWQKDLVPEVAHTALKCHSISSTKKINGQEEKKEDCYMFYQMLDVDGKEKVARDLLKGIWGSQDCWVTATLSTWSTTRSDCAEDLRQRKLHEEQSISFADRFSDAVSLDPNHIIMAEEIDQADYLSQVMFKRAVERGRVCNSTGEEASGHEGIAIGCCDHYHSKTRACSPPSQQKSEGSDNPEDKNAATCGALELNLSIDSAWICDEDCCDEIGLLEVLDAHFKFKCTST

SEQ ID NO: 88 - DNA, 2445 bp, Artificial Sequence
  source 1..2445: /organism="Artificial Sequence" /note="CLP Variant" /mol_type="unassigned DNA"
atgagagccatcggcaccaccatggagaacgccctgaccgccgacgccgccaacgtggtgaagcaggccatgggcctggccagaagaagaggccacgcccaggtgacccccctgcacgtggccagcaccatgctgagcgcccccaccggcctgctgagaaccgcctgcggcaactgccacacccaccccctgaactgcagagccctggaggcctgcttcaacgtggccctgaacagactgcccaccagcaccgccagccccatgctgggcgtgcccaccagcccctggcccagcatgaccaacgtgctggccgccggctggaagagagcccaggcccaccagagaagaggcagcatcgagagccagcagaaccccatcctggtggtgaagatcgaggtggagcagctgatcatcagcatcctggacgaccccagcgtgagcagagtgatgagagaggccggcttcagcagcccccaggtgaagaccaaggtggagcaggccgtgagcgtggacatctgcaccaagaccaccagcagcaccaagcccaaggagggcaagctgctgacccccgtgagaaacgaggaggtgatgaacgtgatcaacaacgccgtggagagaaagagaagacagtacatgatcgtgggcgagagcgccgccaccatcgacggcgtggtgagaaccgtgatggagaagggcgacaagagagaggtgcccgacgtgctgaaggacgtgaagttcatcaccctgtgcttcagctgctacggccagcccagccacgccgacatggagaagaagctggaggacatcgagaccatggtgaagagcaccgtgggcaaggtgatcatcctgaacctgggcgagctgaactacttcgtggagagcagaaccagaggcagcagcctgtacaacaacaacgacagctacagcgtggtggaccacatgatcggcgagatcggcaagctggcctgcgccctggtgctgggcgagagagtgagattctggctggccggcctggccaccagccagagctacgtgagatgcaagagcggcaaccccaccatcgagagcctgtggtgcctgacctgcctgaccatccccgccaccagcaacagcatgagaatgagcatcgtgagcgagtgcgaggccgaggtgaagagaagcgagaacgtgagcctgcagctgcagcagagcagcgaccagggcagctactgcgacgagtgcaccgtgcacttcgagagcgagatcagatacatgcacagcagcaactgccaggccaccaccatgatgggccccgcctggctgaaccagtacagaaaggagaaccagcagagcaagtgcgacagcgacagcatcaaggagatggtggtgaagtggaacagcatcagcgacagcgtgcaccacagacccagcatcaagtgcctgaccctgagcagcccctgctgcagctacagcggcagcagcaaccccagcatcaccaccctgcaccacatccagagcaacggcgagtggcccgtggccgagaccaacagcaagaagagacacagcgtggtgcacgacaccagccacctgagactgtggatccccgaccacgagaccgagaacagaaccgagatcgtgtgcagcaaccccaacagcaccatgaacagcgaggccagcagcagcgacgccatggagatcgagcacggcagcagcagattcagagaggccaacgccgagaacctggccaccctgtgcatcgccggcgagagcaaggtgccctggcagaaggagatggtgcccgagctggccaagaccgtgctgaagtgcagaaccatgagcagcaccagaaagctgaacggcaacgacgacagaaaggaggactgctacgccttcttccagggcatggagggcgacgtgagagaccacgccgccagagagctggccaagctggccttcggcagccaggagagcttcgtgtgcctgaccctgagcagcttcagcagctgcagaagcgacaccgccgaggacgcccaccagaagcacctgagagacgaccagagcctgagctggatcgagagatggagcgagggcgtgagcctggaccccaacagagtgatcctggtggaggacatcgagcaggtggactacctgagccaggtgggcttcaagcacatcgccgagcacatgaaggtgagcaacagctgcggcgaggacggcaccctgagagacgccatcatcatcatgagctgcgagagattcaagagcagaagcaagatcacctgcccccccagccagaacaagagcgacggcagcgagaaccccgaggacaagcaggtgggcaccagcgtggccctggagctgaacctgagcatggacagcgcctacgtgtgcgaggaggagagctgcgacgagatcgtgctgatcgacgccctggacgcccacttcaagttcaagtgctgcagcacc

SEQ ID NO: 89 - protein, 815 aa, Artificial Sequence
  CLP Variant
MRAIGTTMENALTADAANVVKQAMGLARRRGHAQVTPLHVASTMLSAPTGLLRTACGNCHTHPLNCRALEACFNVALNRLPTSTASPMLGVPTSPWPSMTNVLAAGWKRAQAHQRRGSIESQQNPILVVKIEVEQLIISILDDPSVSRVMREAGFSSPQVKTKVEQAVSVDICTKTTSSTKPKEGKLLTPVRNEEVMNVINNAVERKRRQYMIVGESAATIDGVVRTVMEKGDKREVPDVLKDVKFITLCFSCYGQPSHADMEKKLEDIETMVKSTVGKVIILNLGELNYFVESRTRGSSLYNNNDSYSVVDHMIGEIGKLACALVLGERVRFWLAGLATSQSYVRCKSGNPTIESLWCLTCLTIPATSNSMRMSIVSECEAEVKRSENVSLQLQQSSDQGSYCDECTVHFESEIRYMHSSNCQATTMMGPAWLNQYRKENQQSKCDSDSIKEMVVKWNSISDSVHHRPSIKCLTLSSPCCSYSGSSNPSITTLHHIQSNGEWPVAETNSKKRHSVVHDTSHLRLWIPDHETENRTEIVCSNPNSTMNSEASSSDAMEIEHGSSRFREANAENLATLCIAGESKVPWQKEMVPELAKTVLKCRTMSSTRKLNGNDDRKEDCYAFFQGMEGDVRDHAARELAKLAFGSQESFVCLTLSSFSSCRSDTAEDAHQKHLRDDQSLSWIERWSEGVSLDPNRVILVEDIEQVDYLSQVGFKHIAEHMKVSNSCGEDGTLRDAIIIMSCERFKSRSKITCPPSQNKSDGSENPEDKQVGTSVALELNLSMDSAYVCEEESCDEIVLIDALDAHFKFKCCST

SEQ ID NO: 90 - DNA, 2445 bp, Artificial Sequence
  source 1..2445: /organism="Artificial Sequence" /note="CLP Variant" /mol_type="unassigned DNA"
atgagagccctgatctgcaccgtggagaacgccctgaccatggacgccgccaacgtgctgaagcagatgatgggcctggccagaagaagaggccacgcccaggtgacccccctgcacgtggccagcaccatgctgagcgcccccaccggcctgctgagaaccgcctgcctgcagtgccacacccaccccctgaacagcagaatgctggagctgtgctggaacgtggccgcccagagactgcccaccagctgcggcacccccatgctgggcgtgcccaccagccccttccccagcatcagcaacctgctgggcgccgccttcaagaaggcccaggcccacaaccacaagggcagcatcgacagccagcagcagcccatgctggccgtgaagatcgaggtggagcagctgatcatcagcatcctggacgaccccagcgtgagcagagtgatgagagaggccggcttcagcagcccccaggtgaagaccaaggtggagcaggccgtgagcctggagatctgcagcaagaccaccagcagctgccaccccagagagggcaagctgctgagccccgtgagaaacgaggagatcatgaacgtgatccagcagctggtggacaagaagagaagacagttcgtgatcgtgggcgagtgcatggccagcatcgacggcgtgatgaagaccgtgatggagaaggtggaccacaaggacgtgcccgaggtggccaaggacgtgaagttcatgtgcctgagctggagcagcttcggccagcccagcagagccgacgtggacagacacggcgaggagctggacaccatggtgaagagcagcgtgggcaagggcgtggccctgaacctgctggacctgaactggttcgtggagagcagaagcagaggcagcagcctgtacaacaaccaggagagctacaccgtggtggagcacatgatcatggacatcggcaagctggcctgcggcatcgtgggcggcgaccacggcagattctggctgatgatggccgccaccagccagacctacatgagatgcaagaccctgaaccccagcctggagagcgtgtggtgcctgtgcaccggcagcatccccgccaccagcaactgcctgcacctgaccctggtgagcgagagcgagctggagatgaagaagtgcgagaacgtgaccctgaacctgaaccagagcagcgacaacctgagcttctgcgaggagaccagcgtgaagttcgagagcgaggccagatggctgaagagctgcaacaccaacgtgaccaccgtggccctgcccggctggctgcagcagtaccacagagagaaccagaacacccacaccgacagcgactgcatcagagagctgatggtgaagtggcagagcatctgcgacagcatccacaagagacccagcctgaagaccctgaccctgaccagccccagcaccagctggagcgccagcacccagcccagcatcagcaccctgaagcacctgcagtgcaacggcgactaccccgtggccgagtgcaactgccacagacaccacagcgtggtgcacgagaccagccacctgagactgttcatccccgagcacgactgcgagcagaagaccgagatggtgtgcagcaacccccagagcaccatgcagagcgacctgagcagcagcgacgccatggagctggagcacgccagcagcagattccacgacatgaacgccgagaacctggccagcctgtgcgccgccgtggagagcaaggtgccctggcagaaggacgtggtgcccgagggcgccaagaccgtgctgaagaccagatgcggcagcagcaccagaaaggtgaacctgaacgacgacagacacgacgacagctggatgttcttccagggcctggacatcgacgcccacgagaagatcgccagagagctggccaagctggtgttcggcagccaggacagctacgtgagcatctgcatgagcagcttcagcagcaccaagagcgacagcgccgaggacctgagaaacaagagactgagagacgagcagagcctgagctggatcgagagattcagcgagatggtgagcctggagccccagcacgtgatcctggtggaggacggcgacaacctggacttcctgtgcaacgtgggcttcaagagagccgtggagagaggcagagtgagccagagcagcctggacgaggccagcctgagagacgccctggtgatcctgagcagcgacagattccacagccacaccagagcctgctgcccccccagccagcagaagagcgacggcagcgaccagcccgaggagaagaacatcgccacctgcgtggccctggacctgaacctgagcatcgacagcgcctggctgaccgaggaggagagctgcgacgagatcggcctgctggacctggtggacatgagattccacttcaagtgcagcagctgc

SEQ ID NO: 91 - protein, 815 aa, Artificial Sequence
  CLP Variant
MRALICTVENALTMDAANVLKQMMGLARRRGHAQVTPLHVASTMLSAPTGLLRTACLQCHTHPLNSRMLELCWNVAAQRLPTSCGTPMLGVPTSPFPSISNLLGAAFKKAQAHNHKGSIDSQQQPMLAVKIEVEQLIISILDDPSVSRVMREAGFSSPQVKTKVEQAVSLEICSKTTSSCHPREGKLLSPVRNEEIMNVIQQLVDKKRRQFVIVGECMASIDGVMKTVMEKVDHKDVPEVAKDVKFMCLSWSSFGQPSRADVDRHGEELDTMVKSSVGKGVALNLLDLNWFVESRSRGSSLYNNQESYTVVEHMIMDIGKLACGIVGGDHGRFWLMMAATSQTYMRCKTLNPSLESVWCLCTGSIPATSNCLHLTLVSESELEMKKCENVTLNLNQSSDNLSFCEETSVKFESEARWLKSCNTNVTTVALPGWLQQYHRENQNTHTDSDCIRELMVKWQSICDSIHKRPSLKTLTLTSPSTSWSASTQPSISTLKHLQCNGDYPVAECNCHRHHSVVHETSHLRLFIPEHDCEQKTEMVCSNPQSTMQSDLSSSDAMELEHASSRFHDMNAENLASLCAAVESKVPWQKDVVPEGAKTVLKTRCGSSTRKVNLNDDRHDDSWMFFQGLDIDAHEKIARELAKLVFGSQDSYVSICMSSFSSTKSDSAEDLRNKRLRDEQSLSWIERFSEMVSLEPQHVILVEDGDNLDFLCNVGFKRAVERGRVSQSSLDEASLRDALVILSSDRFHSHTRACCPPSQQKSDGSDQPEEKNIATCVALDLNLSIDSAWLTEEESCDEIGLLDLVDMRFHFKCSSC

SEQ ID NO: 92 - DNA, 2445 bp, Artificial Sequence
  source 1..2445: /organism="Artificial Sequence" /note="CLP Variant" /mol_type="unassigned DNA"
atgagagccggcggctgcaccgtggagaacatgctgagcgccgacgccatcaacgtggtgaagcaggccatgggcctggccagaagaagaggccacgcccaggtgacccccctgcacgtggccagcaccatgctgagcgcccccaccggcctgctgagaaccgcctgcctgcagagccacacccaccccctgcagtgcagagccctggagctgtgcttcaacgtggtgctgaaccacctgcccacctgcaccctgagccccatgctgggcgtgccctgcagccccttccccagcatcagcaacggcctgggcctggtgttcaagagagcccaggccaagaacaagagagccagcatcgagagccagcagcagcccatcctggccgtgaagatcgaggtggagcagctgatcatcagcatcctggacgaccccagcgtgagcagagtgatgagagaggccggcttcagcagcccccaggtgaagaccaaggtggagcaggccgtgagcctggagatcaccagcaagaccaccagcagcagcaagcccaaggaggtgaagctgatgacccccgtgagaaacgaggaggtgatgaacgtgatcaacaacctggtggacaagaagagaagaaactacgtgatcgtgggcgagtgcctgatgaccatcgacggcgtgatgaagaccgtgatcgagagaggcgacaagaaggacgtgcccgacgtgatcaaggacgtgaagtggatcaccatgagcttcagcagcttcggccagcccagcagaggcgacgtggagagaaagctggaggagctggagaccctgatgaagagctgcgtgatcaagggcgtgatcctgaacatgggcgacctgaactggtacgtggagagcagaaccagaggcacctgcctgtaccagaacaacgacagctactgcgtggtggagcacatcatcatggagatcggcaagctggcctgcatcctggtgatgggcgaccacatcagattctggctgatgggcctggccaccagccagacctacgtgagatgccacagcgcccagcccagcctggagagcgcctggtgcctgacctgcctgaccatccccatgaccagcaacagcctgagaatcaccgccgtgagcgacagcgagctggaggtgaagaagagcgagaacggcagcctgcagctgcagcagagctgcgaccagctgagctggtgcgaggagtgctgcgtgaagttcgagaccgacgccagattcctgaagagcagcaacagcaacgtgaccaccgtggccctgcccgcctacctgcagcagtacaagagagagaaccagaacagccacaccgacagcgacagcggcaaggagctggtggtgaagtggcagagcatctgcgacagcatccacaagcaccccagcctgaagaccctgaccctgaccagccccaccagctgcttcagcggcagcacccagcccaccatcagcaccgcccaccacctgcagaccaacggcgactggcccgtgatcgagacccagacccacagacaccacagcgtggtgcacgagagcagccacgccagactgttcatccccgagcacgacagcgagcagaagaccgagctggtgagcagcaaccccaacagcaccatcaacagcgagctgagcagcagcgacggcatggaggccgagagagccagcagcagattcaaggagatgaacgccgagaacctggccaccctgtgcatcgccctggagagcaagatcccctggcagcacgagctggtgcccgagctggccaagaccgtgctgaagtgcagaagcatcagcagcaccagaaagatcaacggcaacgaggacaagaaggaggagacctggatgttcttccagggcctggaggtggacgccaaggacaagatcatgagagacatcgccagactggtgttcggcagccaggagagcttcgtgagcatcagcctgagcagcttcagcagcaccagaagcgacagcgccgaggacctgaagcagaagagactgagagacgagcagagcctgtgctacatcgagaagtacagcgacgccgtgtgcctggaccccaaccacgtgatcctggtggaggacatcgagcaggccgactacgcctgccaggtgggcttcaagagagccgtggagagagtgagagtgtgcaacagcagcggcgaggaggccagcatcaaggacgccatcgtgatcctgtgctgcgacagattcagaagcagaagcagagcctgcagcccccccagcaacaacaagagcgacggcagcgagcagcccgaggaccacaacatgatgtgctgcgtggccctggacctgcagctgagcatcgacaccatgtgggtgagcgaggaggagagcaccgacgacatgggcctgctggaggccgtggacgccagattccacttcaagtgcagcagcacc

SEQ ID NO: 93 - protein, 815 aa, Artificial Sequence
  CLP Variant
MRAGGCTVENMLSADAINVVKQAMGLARRRGHAQVTPLHVASTMLSAPTGLLRTACLQSHTHPLQCRALELCFNVVLNHLPTCTLSPMLGVPCSPFPSISNGLGLVFKRAQAKNKRASIESQQQPILAVKIEVEQLIISILDDPSVSRVMREAGFSSPQVKTKVEQAVSLEITSKTTSSSKPKEVKLMTPVRNEEVMNVINNLVDKKRRNYVIVGECLMTIDGVMKTVIERGDKKDVPDVIKDVKWITMSFSSFGQPSRGDVERKLEELETLMKSCVIKGVILNMGDLNWYVESRTRGTCLYQNNDSYCVVEHIIMEIGKLACILVMGDHIRFWLMGLATSQTYVRCHSAQPSLESAWCLTCLTIPMTSNSLRITAVSDSELEVKKSENGSLQLQQSCDQLSWCEECCVKFETDARFLKSSNSNVTTVALPAYLQQYKRENQNSHTDSDSGKELVVKWQSICDSIHKHPSLKTLTLTSPTSCFSGSTQPTISTAHHLQTNGDWPVIETQTHRHHSVVHESSHARLFIPEHDSEQKTELVSSNPNSTINSELSSSDGMEAERASSRFKEMNAENLATLCIALESKIPWQHELVPELAKTVLKCRSISSTRKINGNEDKKEETWMFFQGLEVDAKDKIMRDIARLVFGSQESFVSISLSSFSSTRSDSAEDLKQKRLRDEQSLCYIEKYSDAVCLDPNHVILVEDIEQADYACQVGFKRAVERVRVCNSSGEEASIKDAIVILCCDRFRSRSRACSPPSNNKSDGSEQPEDHNMMCCVALDLQLSIDTMWVSEEESTDDMGLLEAVDARFHFKCSST

SEQ ID NO: 94 - DNA, 2445 bp, Artificial Sequence
  source 1..2445: /organism="Artificial Sequence" /note="CLP Variant" /mol_type="unassigned DNA"
atgagaatcggcggctgcaccgtggagcaggccctgaccgccgaggccggcaacgtgatgagacaggccatgggcctggccagaagaagaggccacgcccaggtgacccccctgcacgtggccagcaccatgctgagcgcccccaccggcctgctgagaaccgcctgcctgcagagcaagacccaccccctgaactgcagagccctggagctgtgcttcaacgtgatgctgaacagactgcccaccagcaccggcagccccatcctgggcgtgcccaccagccccttccccagcatcagcaacgccctgggcgccgccttcaagagagcccaggcccacaacagaagaggcagcgccgactgccagcagcagcccatcctggccgtgaagatcgaggtggagcagctgatcatcagcatcctggacgaccccagcgtgagcagagtgatgagagaggccggcttcagcagcccccaggtgaagaccaaggtggagcaggccgtgagcctggaggtgtgcagcagaaccaccagcagcagcaagcccaaggagggcaagctgctgacccccgtgagaaacgaggacgtgatgaacgtgatcaacaacctgatcgacaagaagagaagaaacttcgtgatcatgggcgagtgcctggccaccatcgacggcgtggtgaagaccgtgatggagaaggtggaccacaaggacgtgcccgaggtgctgaaggacgtgaagtggatcaccctgagcttctgcagcttcctgcagcccagcagagccgacgtggagagaaagctggaggacctggagaccctggtgaagagctgcgccggcaagggcgtgatcctgaacctgggcgagctgcagtggttcgtggagagcagaacccacggcaccagcctgtacaacaacaacgacacctactgcgtggtggagcacggcatcatggagatcgccaagctggcctgcggcctggtgatgggcgaccacggcagattctggctgatgggcatcgtgaccagccagacctgggtgagatgcaagagcggccagcccagcctggagagcctgtggtgcctgagcaccctgagcatccccgccaccagcaacagcctgagactgaccctgatcagcgagagcgagctggaggtgaagaagagcgagaacgtgagcgtgcagctgcagcagaccagcgaccagctgagcttctgcgaggagtgcagcgtgaagttcgagagcgacgccagattcctgaagagcagcaacagcaacatcaccaccgtggccctgcccgcctggctgcagaactacaagaaggagaaccagaacagcagaaccgacagcgacaccatcaaggagctggtggtgcactggcagagcatctgcgagagcatccacaagagacccagcctgaagaccctgaccgtgagcagccccaccagcagcttcagcctgagcacccagcccagcatcagcaccctgcacaagctgcagaccaacggcgactggcccgtgatcgagacccagacccacagacaccacagcgtggtgcacgagaccagccacctgagactgttcatccccgacagagacagcgagcagaagaccgagctggtgtgcagcaaccccaacagcaccatgaacagcgaggccagcagcagcgacggcatggagctggagcacgccagcagcagattcaaggagatgcaggccgacaacgccgccaccctgtgcgccctgctggagagcaaggtgccctggcagaaggacctggtgcccgagctggccaagaccgtgctgaagtgcagaagcggcagcagcaccagaaagatcaacggcaacgaggacaagaaggaggacaccttcatgttcttccagggcggcgacgtggacgccaaggagaagatcgccagagagctggccaagctggtgttcgccagccaggacagcttcgtgagcatctgcctgagcaccttcagcagcaccaagagcgacagcgccgaggacctgagaaacaagagactgagagacgagcagaccctgagctacatcgacagattcagcgaggccgtgagcctggaccccaacagagtgatcctggtggaggacatcgagaacgccgactacctgagccaggtgggcttcaagagagccgtggagagaggcagagtgtgcaacagcaccggcgaggaggccagcggcaaggacgccatcgtggccctgagctgcgagagatggcacagcagaacccacgcctgcagcccccccaccaaccagaagagcgacggcagcgaccagcccgaggacagaaacgtggccacctgcgtggccctggacctgaacctgagcatcgacagcgcctacgtgtgcgaggaggagagctgcgacgagatcggcatcctggaggccggcgacgccagattccacttcaagagcagcaccacc

SEQ ID NO: 95 - protein, 815 aa, Artificial Sequence
  CLP Variant
MRIGGCTVEQALTAEAGNVMRQAMGLARRRGHAQVTPLHVASTMLSAPTGLLRTACLQSKTHPLNCRALELCFNVMLNRLPTSTGSPILGVPTSPFPSISNALGAAFKRAQAHNRRGSADCQQQPILAVKIEVEQLIISILDDPSVSRVMREAGFSSPQVKTKVEQAVSLEVCSRTTSSSKPKEGKLLTPVRNEDVMNVINNLIDKKRRNFVIMGECLATIDGVVKTVMEKVDHKDVPEVLKDVKWITLSFCSFLQPSRADVERKLEDLETLVKSCAGKGVILNLGELQWFVESRTHGTSLYNNNDTYCVVEHGIMEIAKLACGLVMGDHGRFWLMGIVTSQTWVRCKSGQPSLESLWCLSTLSIPATSNSLRLTLISESELEVKKSENVSVQLQQTSDQLSFCEECSVKFESDARFLKSSNSNITTVALPAWLQNYKKENQNSRTDSDTIKELVVHWQSICESIHKRPSLKTLTVSSPTSSFSLSTQPSISTLHKLQTNGDWPVIETQTHRHHSVVHETSHLRLFIPDRDSEQKTELVCSNPNSTMNSEASSSDGMELEHASSRFKEMQADNAATLCALLESKVPWQKDLVPELAKTVLKCRSGSSTRKINGNEDKKEDTFMFFQGGDVDAKEKIARELAKLVFASQDSFVSICLSTFSSTKSDSAEDLRNKRLRDEQTLSYIDRFSEAVSLDPNRVILVEDIENADYLSQVGFKRAVERGRVCNSTGEEASGKDAIVALSCERWHSRTHACSPPTNQKSDGSDQPEDRNVATCVALDLNLSIDSAYVCEEESCDEIGILEAGDARFHFKSSTT

SEQ ID NO: 96 - DNA, 2445 bp, Artificial Sequence
  source 1..2445: /organism="Artificial Sequence" /note="CLP Variant" /mol_type="unassigned DNA"
atgagagccggcatctgcaccgtggagcaggccctgaccgccgaggccgccaacgtggtgagacaggccatgggcctggccagaagaagaggccacgcccaggtgacccccctgcacgtggccagcaccatgctgagcgcccccaccggcctgctgagaaccgcctgcctgcagacccacacccaccccctgcagtgcagagccctggagctgtgcttcaacgtggccctgaacagactgcccaccagcagcggcacccccatcctgggcgtgcccagcagccccttccccagcatcagcaacgtgctgggcgccgccttcaagagaatgcaggcccaccagagaagaggcagcatcgagagccagcagcagcccatcggcgccgtgaagatcgaggtggagcagctgatcatcagcatcctggacgaccccagcgtgagcagagtgatgagagaggccggcttcagcagcccccaggtgaagaccaaggtggagcaggccgtgagcctggagatctgcagcaagaccaccagcagcagcaagcccaaggagggcaagctgctgacccccgtgagaaacgaggacgtgatgaacatcgtgaacaacctggtggacaagaagagaaagaacttcatgatcatcggcgagtgcctggccaccatcgacggcggcgtgaagaccgtgatggagaaggtggacaagaaggaggtgcccgaggtgctgcacgacgtgaagtacatcaccctgagcttcagcagcttcggccagcccagcagagccgacgtggagagaaagctggaggagctggagaccctggtgaagagctgcgtgggcaagggcgtgatcctgaacctgggcgacctgaactggttcgtggagagcagaaccagaggcagcagcctgtacaacaacaacgacagctactgcgtggtggagcacatgatcatggagatcggcaagctggcctgcggcctggtgatgggcgaccacggccacttctggctgatgggcctggccaccagccagacctacgtgagatgcaagagcatgcagcccagcctggagagcctgtggagcctgaccaccctgaccatccccgccaccagcaacagcctgagactgagcctggtgagcgagagcgagctggaggtgaagaagagcgagaacgtgagcctgaacctgcagcagagcagcgaccagctgagcttctgcgaggagtgcagcgtgaagttcgagagcgaggccagattcctgaagagcagcaactgcaacctgaccaccgtggccctgcccgcctggctgcagcagttcaagaaggagcagcagaacagccactgcgacagcgacaccatcaaggagctggtggtgaagttcaacagcatctgcgacagcatccacaagagacccagcctgaagaccctgaccctgagcagccccaccagcaccttcagcggcagcacccagcccagcatcagcaccctgcaccacctgcagacccagggcgactggcccgtggccgagaccaacacccacagacaccacagcgtggtgcacgacaccacccacctgagactgttcatccccgagagagacagcgagcagaagagcgagctggtgtgcagcaaccccaacagcaccatgaacagcgaggccagcagctgcgacgccatggagctggagagagccagcagcagattcaaggacatgaacgccgagaacctggccagcctgtgcatggccctggagagccacgtgccctggcagaaggacctggtgcccgagctggccaagaccgtgctgaagtgcagaagcggcagcagcaccagaaagatcaacggcaacgaggacaagaaggaggacacctggatgttcttccagggcctggacgtggaggcccacgagaagatcgccagagagctgggcaagggcgtgttcggcagccaggagagcttcgtgagcatctgcctgagcagcttcagcagcaccagaagcgacagcgccgaggagctgagaaacaagagactgagagacgaccagagcctgagctacatcgagagatggagcgagatcgtgagcctggaccccaacaaggtgatcctggtggaggacatcgagcaggccgactacctgagccaggtgggcttcagaagagccgtggagagaggcagagtgtgccagagcaccggcgaggaggccagcctgaaggacgccatcgtgatcctgagctgcgagagattcagaagcagaagcagagcctgcagcccccccagcaaccagaagagcgacggcagcgaccagcccgacgacaagaacgtggccacctgcgtggccatcgacatgaacctgagcatcgacagcatgtacgtgtgcgaggacgagagctgcgacgagatcggcctgctggaggccgtggacgccagattccactacaagtgcagcagcacc

SEQ ID NO: 97 - protein, 815 aa, Artificial Sequence
  CLP Variant
MRAGICTVEQALTAEAANVVRQAMGLARRRGHAQVTPLHVASTMLSAPTGLLRTACLQTHTHPLQCRALELCFNVALNRLPTSSGTPILGVPSSPFPSISNVLGAAFKRMQAHQRRGSIESQQQPIGAVKIEVEQLIISILDDPSVSRVMREAGFSSPQVKTKVEQAVSLEICSKTTSSSKPKEGKLLTPVRNEDVMNIVNNLVDKKRKNFMIIGECLATIDGGVKTVMEKVDKKEVPEVLHDVKYITLSFSSFGQPSRADVERKLEELETLVKSCVGKGVILNLGDLNWFVESRTRGSSLYNNNDSYCVVEHMIMEIGKLACGLVMGDHGHFWLMGLATSQTYVRCKSMQPSLESLWSLTTLTIPATSNSLRLSLVSESELEVKKSENVSLNLQQSSDQLSFCEECSVKFESEARFLKSSNCNLTTVALPAWLQQFKKEQQNSHCDSDTIKELVVKFNSICDSIHKRPSLKTLTLSSPTSTFSGSTQPSISTLHHLQTQGDWPVAETNTHRHHSVVHDTTHLRLFIPERDSEQKSELVCSNPNSTMNSEASSCDAMELERASSRFKDMNAENLASLCMALESHVPWQKDLVPELAKTVLKCRSGSSTRKINGNEDKKEDTWMFFQGLDVEAHEKIARELGKGVFGSQESFVSICLSSFSSTRSDSAEELRNKRLRDDQSLSYIERWSEIVSLDPNKVILVEDIEQADYLSQVGFRRAVERGRVCQSTGEEASLKDAIVILSCERFRSRSRACSPPSNQKSDGSDQPDDKNVATCVAIDMNLSIDSMYVCEDESCDEIGLLEAVDARFHYKCSST

SEQ ID NO: 98 - DNA, 2445 bp, Artificial Sequence
  source 1..2445: /organism="Artificial Sequence" /note="CLP Variant" /mol_type="unassigned DNA"
atgagagccggcggctgcaccgtggagcaggccctgagcgccgacgccgccaacgtggtgaagcaggccatgggcctggccagaagaagaggccacgcccaggtgacccccctgcacgtggccagcaccatgctgagcgcccccaccggcctgctgagaaccgcctgcctgcagagccacacccaccccctgcagtgcagagccctggagctgtgcttcaacgtggccctgaacagactgcccagcagcaccggcagccccatgctgggcgtgcccaccagccccttccccagcatcagcaacgccctgggcgccgccttcaagagagcccagatgcaccagagaaagggcagcatcgagagccagcagcagcccgtgctggccgtgaagatcgaggtggagcagctgatcatcagcatcctggacgaccccagcgtgagcagagtgatgagagaggccggcttcagcagcccccaggtgaagaccaaggtggagcaggccgtgagcctggagatctgcagcaagaccaccagcagcagcaagcccaaggagggcaagctgctgacccccgtgagaaacgaggacgtgatgaacgtgggcaacaacctggtggacaagaagagaagaaacttcgtgatcgtgggcgagtgcctggccaccatcgacggcgtggtgaagaccgtgatggagaaggtggacaagaaggacgtgcccgaggtgctgaaggacgtgaagttcatcaccctgagcttcagcagcttcggccagcccagcagagccgacgtggagagaaagctggaggaggccgagaccctggtgaagagcagcgtgggcaagggcgtgatcggcaacctgggcgacctgaactggttcgtggagagcagaaccagaggcagcagcctgtacaaccagaacgacagctactgcgtggtggagcacatgatcatggagatcggcaagctggtgtgcggcctggtgatgggcgaccacggcagattctggctgatgggcctggcctgcagccagacctgggtgagatgcaagagcggccagcccagcctggagagcctgtggtgcctgaccaccctgaccatccccgccaccagcaacagcctgagactgagcctggtgagcgagagcgagctggaggtgaagaagaccgagaacgtgagcctgcagctgcagcagagcagcgaccagctgagcttctgcgaggagtgcagcgtgaagtacgacagcgaggccagattcctgaagagcagcaacagcaacgtgaccaccgtggccctgcccctgtggctgcagaactacaagaaggagaaccagaacagccacaccgacagcgacagcatcaaggagctggtggtgaagtggaacagcatctgcgacagcatccacagaagacccagcctgaagaccctgaccctgagcagcccctgcagcagcttcagcgccagcagccagcccagcggcagcagcctgagaagaatgcagaccaacggcgactggcccgtgatcgagaccaacacccacaagcaccacagcgtggtgcacgagaccagccacctgagactgttcatccccgagcacgacagcgagcagcacaccgagctggtgtgcagcaaccccaacagcaccatgaacagcgaggccagcagcagcgacgccatggagctggagcacgccagcagcagattcaaggagatgaacgccgagaacctggccaccctgtgcgccgccctggagagcaaggtgccctggcagaaggacctggtgcccgagctggccaagaccgtgctgaagtgcagaagcggctgcagcaccagaaagatcaacggcaacgaggacaagaaggacgacacctggatgttcttccagggcctggacgtggacgccaaggagaagatcgccagagagctggccaagctggtgttcggcagccaggacagcttcgtgagcatctgcgtgagcagcttcagcagctgcagaagcgacagcgccgaggacctgagaaacaagagactgagagacgagcagagcatctgctacggcgagagattcagcgaggccgtgagcctggaccccaacagagtgatcctggtggaggacatcgagcaggccgactacctgagccaggtgggcttcaagagagccgtggagagaggcagagtgtgcaacagcagcggcgaggaggccagcctgaaggacgccatcgtgctgctgagctgcgagagattcagaagcagaagcagagcctgcagcccccccagcaacaacaagagcgacggcagcgaccagcccgaggacaagaacgtggccacctgcgtggccctggacctgaacctgagcatcgacagcgcctacgtgtgcgaggaggagagctgcgacgagatcggcctgctggaggccgtggaggccagattccacttcaagagcagcagcacc

SEQ ID NO: 99 - protein, 815 aa, Artificial Sequence
  CLP Variant
MRAGGCTVEQALSADAANVVKQAMGLARRRGHAQVTPLHVASTMLSAPTGLLRTACLQSHTHPLQCRALELCFNVALNRLPSSTGSPMLGVPTSPFPSISNALGAAFKRAQMHQRKGSIESQQQPVLAVKIEVEQLIISILDDPSVSRVMREAGFSSPQVKTKVEQAVSLEICSKTTSSSKPKEGKLLTPVRNEDVMNVGNNLVDKKRRNFVIVGECLATIDGVVKTVMEKVDKKDVPEVLKDVKFITLSFSSFGQPSRADVERKLEEAETLVKSSVGKGVIGNLGDLNWFVESRTRGSSLYNQNDSYCVVEHMIMEIGKLVCGLVMGDHGRFWLMGLACSQTWVRCKSGQPSLESLWCLTTLTIPATSNSLRLSLVSESELEVKKTENVSLQLQQSSDQLSFCEECSVKYDSEARFLKSSNSNVTTVALPLWLQNYKKENQNSHTDSDSIKELVVKWNSICDSIHRRPSLKTLTLSSPCSSFSASSQPSGSSLRRMQTNGDWPVIETNTHKHHSVVHETSHLRLFIPEHDSEQHTELVCSNPNSTMNSEASSSDAMELEHASSRFKEMNAENLATLCAALESKVPWQKDLVPELAKTVLKCRSGCSTRKINGNEDKKDDTWMFFQGLDVDAKEKIARELAKLVFGSQDSFVSICVSSFSSCRSDSAEDLRNKRLRDEQSICYGERFSEAVSLDPNRVILVEDIEQADYLSQVGFKRAVERGRVCNSSGEEASLKDAIVLLSCERFRSRSRACSPPSNNKSDGSDQPEDKNVATCVALDLNLSIDSAYVCEEESCDEIGLLEAVEARFHFKSSST

SEQ ID NO: 100 - DNA, 2445 bp, Artificial Sequence
  source 1..2445: /organism="Artificial Sequence" /note="CLP Variant" /mol_type="unassigned DNA"
atgagagccggcggctgcaccgtggagcaggccgtgaccgccgacgccgccaacgtggtgaagcaggccatgggcctggccagaagaagaggccacgcccaggtgacccccctgcacgtggccagcaccatgctgagcgcccccaccggcctgctgagaaccgcctgcctgaacagccacacccaccccctgcagtgcagagccctggagctgtgcttcaacgtggccctgaacagactgcccaccagcaccggcagccccatgctgggcgtgcccaccagccccttccccagcatcagcaacggcctgggcgccgccttcaagaaggcccaggcccaccagagaagaggcagcatcgagagccagcagcagcccatcatggccgtgaagatcgaggtggagcagctgatcatcagcatcctggacgaccccagcgtgagcagagtgatgagagaggccggcttcagcagcccccaggtgaagaccaaggtggagcaggccgtgagcctggagatctgcagcaagaccaccagcagcagcaagcccaaggagggcaagctgctgacccccgtgagaaacgaggacgtgatgaacgtgatcaacaacctggtggacaagaagagaagaaacttcgtgatcgtgggcgagtgcctggccaccatcgacggcatcgtgaagaccgtgatggagaaggtggacaagaaggacggccccgaggtgctgaaggacgtgaagttcatcaccctgagcttcagcagcttcggccagcccagcagagccgacgtggagagaagactggaggagctggagaccatggtgaagagctgcgtgggcaagggcgtgatcctgaacctgggcgacctgaactggttcgtggagagcagaaccagaggcagcagcctgtacaacaacaacgacagctactgcgtggtggagcacatgatcatggacatcggcaagctggcctgcggcctggtgatgggcgaccacggcagattctggctgatgggcctggccaccagccagacctacgtgagatgcaagagcggccagcccagcctggagagcctgtggagcctgaccaccctgaccatccccgccaccagcaacagcgccagactgagcctggtgagcgagagcgagctggaggtgaagaagagcgagaacgtgagcctgcagctgcagcagagcagcgaccagctgagcttctgcgaggagtgcagcgtgaagttcgagagcgaggccagattcctgaagagcagcaacagcaacgtgaccaccgtggccctgcccgcctggctgcagcagtacaagaaggagaaccagaacagccacaccgacagcgacagcatcaaggagctggtggtgaagtggaacagcatctgcgacagcatccacaagagacccagcctgaagaccctgaccctgagcagccccaccagcagcttcagcggcagcacccagcccagcatctgcaccctgcaccacctgcagaccaacggcgactaccccgtgatcgagaccaacacccacagacaccacagcgtggtgcacgagagcagccacctgagactgttcatccccgagcacgacaccgagcagaagaccgagctggtgtgcagcaaccccaacagcaccatgaacagcgagatgagcagcagcgacgccatggagctggagcacgccagcagcagattcaaggagatgaacgccgacaacctggccaccctgtgcgccgccctggagagcaaggtgccctggcagaaggacctggtgcccgagctggccaagaccatgatcaagtgcagaagcggcagcagcaccagaaagatcaacggcaacgaggacaagaaggaggacacctggctgttcttccagggcctggacgtggaggccaaggagaagatcgccagagagctggccaagctggtgttcggcagccaggacagcttcgtgagcatctgcctgagcagcttcagcagcaccagatgcgacagcatggaggacctgagacagaagagactgagagacgagcagagcatgagctacatcgagagattcagcgaggccgtgagcctggaccccaacagagtgatcctggtggacgacatcgagcaggccgactacctgagccaggtgggcttcaagagagccgtggagagaggcagagtgtgcaacagcaccggcgaggaggccagcctgaaggacgccatcgtgatcctgagctgcgagagattccacagcagaagcagagcctgcagcccccccagcaaccagaagagcgacggcagcgagcagcccgaggacaagaacgtggccacctgcgtggccctggacctgaacctgagcatcgacagcgcctacgtgtgcgaggaggagagctgcgacgagatcggcctgctggaggccgtggaggccagattccacttcaagtgcagcagcacc

SEQ ID NO: 101 - protein, 815 aa, Artificial Sequence
  CLP Variant
MRAGGCTVEQAVTADAANVVKQAMGLARRRGHAQVTPLHVASTMLSAPTGLLRTACLNSHTHPLQCRALELCFNVALNRLPTSTGSPMLGVPTSPFPSISNGLGAAFKKAQAHQRRGSIESQQQPIMAVKIEVEQLIISILDDPSVSRVMREAGFSSPQVKTKVEQAVSLEICSKTTSSSKPKEGKLLTPVRNEDVMNVINNLVDKKRRNFVIVGECLATIDGIVKTVMEKVDKKDGPEVLKDVKFITLSFSSFGQPSRADVERRLEELETMVKSCVGKGVILNLGDLNWFVESRTRGSSLYNNNDSYCVVEHMIMDIGKLACGLVMGDHGRFWLMGLATSQTYVRCKSGQPSLESLWSLTTLTIPATSNSARLSLVSESELEVKKSENVSLQLQQSSDQLSFCEECSVKFESEARFLKSSNSNVTTVALPAWLQQYKKENQNSHTDSDSIKELVVKWNSICDSIHKRPSLKTLTLSSPTSSFSGSTQPSICTLHHLQTNGDYPVIETNTHRHHSVVHESSHLRLFIPEHDTEQKTELVCSNPNSTMNSEMSSSDAMELEHASSRFKEMNADNLATLCAALESKVPWQKDLVPELAKTMIKCRSGSSTRKINGNEDKKEDTWLFFQGLDVEAKEKIARELAKLVFGSQDSFVSICLSSFSSTRCDSMEDLRQKRLRDEQSMSYIERFSEAVSLDPNRVILVDDIEQADYLSQVGFKRAVERGRVCNSTGEEASLKDAIVILSCERFHSRSRACSPPSNQKSDGSEQPEDKNVATCVALDLNLSIDSAYVCEEESCDEIGLLEAVEARFHFKCSST

SEQ ID NO: 102 - DNA, 2445 bp, Artificial Sequence
  source 1..2445: /organism="Artificial Sequence" /note="CLP Variant" /mol_type="unassigned DNA"
atgagagccggcggctgcaccgtggagcaggccctgaccgccgacgccggcaacgtgatcagacagatcatgggcctggccagaagaagaggccacgcccaggtgacccccctgcacgtggccagcaccatgctgagcgcccccaccggcctgctgagaaccgcctgcctgcagagccacacccaccccctgcagtgcagagccctggagctgtgcttcaacgtggccctgaacagactgcccaccagcaccggcagccccatgctgggcgtgcccaccagccccttccccagcatcagcaacgccctgggcgccgccttcaagagagcccaggcccaccagagaagaggcagcatcgagagccagaaccagcccatcctggccgtgaagatcgaggtggagcagctgatcatcagcatcctggacgaccccagcgtgagcagagtgatgagagaggccggcttcagcagcccccaggtgaagaccaaggtggagcaggccgtgagcctggagatctgcagcaagaccaccagcagcagcagacccaaggagggcaagctgctgacccccgtgagaaacgaggacgtgatgaacgtgatcaacaacctggtggacaagaagagaagaaacttcgtgatcgtgggcgagtgcctggccaccatcgacggcgtggtgaagaccgtgatggagaaggtggacaagaaggacgtgcccgaggtgctgaaggacgtgaagttcatcaccctgagcttcagcagcttcggccagcccagcagagccgacgtggagagacacgccgaggagctggagaccctggtgaagagctgcgtgggcaagggcgtgatcctgaacctgggcgacctgaactggttcgtggagagcagaaccagaggcagcagcctgtacaacaacaacgacagctactgcgtggtggagcacatgatcatggagatcggcaagctggcctgcggcctggtgatgggcgaccacggcagattctggctgatgggcctggccaccagccagacctacgtgagatgcaagagcggccagcccagcctggacagcctgttctgcctgaccaccctgagcatgcccgccaccagcaacagcctgagactgagcctggtgagcgagagcgagctggaggtgaagaagagcgagaacgtgagcctgcagctgcagcagagcagcgaccagctgagcttctgcgaggagtgcagcgtgaagttcgagagcgaggccagattcctgaagagcagcaacagcaacgtgaccaccgtggccctgcccgcctggctgcagcagtacaagaaggagaaccagaacagccacaccgacagcgacagcatcaaggagctggtggtgaagtggaacagcatctgcgacagcatccacaagagacccagcctgaagaccctgaccctgagcagccccaccagcagcttcagcggcagcacccagcccagcatcagcaccctgcaccacctgcagaccaacggcgactggcccgtgatcgagaccaacacccacagacaccacagcgtggtgcacgagaccagccacctgagactgttcatccccgagcacgacagcgagaacaagtgcgagctggtgtgcagcaacccccagagcaccatgaacagcgaggccagcagcagcgacgccatggagctggagcacgccagcagccacttcaaggagatgaacgccgagaacctggccaccctgtgcgccgccctggagagcaaggtgccctggcagaaggacctggtgcccgagctggccaagaccgtgctgaagtgcagaagcggcagcagcaccagaaagatcaacggcaacgaggacaagaaggaggacacctggatgttcttccagggcctggacgtggacgccaaggagaagatcgccagagagggcgccaagctggtgttcggcagccaggacagcttcgtgagcatctgcctgagctgcttcagcagcaccagaagcgacagcgccgaggacctgagaaacaagagactgagagacgagcagagcctgagctacatcgagagattcagcgaggccgtgagcctggacccccagagagtgatcctggtggaggacatcgagcaggccgactacctgagccaggtgggcttcaagagagccgtggagagaggcagagtgtgcaacagcagcggcgaggaggccaccctgaaggacgccatcgtgctgctgagctgcgagagattcagaagcagaagcagagcctgcagcccccccagcaaccagaagagcgacgtgagcgaccagcccgaggacaagaacgtggccacctgcgtggccctggacctgaacctgagcatcgacagcgcctacgtgtgcgaggaggagagctgcgacgagatcggcctgctggaggccgtggacgccagattccacttcaagtgcaccagcacc

SEQ ID NO: 103 - protein, 815 aa, Artificial Sequence
  CLP Variant
MRAGGCTVEQALTADAGNVIRQIMGLARRRGHAQVTPLHVASTMLSAPTGLLRTACLQSHTHPLQCRALELCFNVALNRLPTSTGSPMLGVPTSPFPSISNALGAAFKRAQAHQRRGSIESQNQPILAVKIEVEQLIISILDDPSVSRVMREAGFSSPQVKTKVEQAVSLEICSKTTSSSRPKEGKLLTPVRNEDVMNVINNLVDKKRRNFVIVGECLATIDGVVKTVMEKVDKKDVPEVLKDVKFITLSFSSFGQPSRADVERHAEELETLVKSCVGKGVILNLGDLNWFVESRTRGSSLYNNNDSYCVVEHMIMEIGKLACGLVMGDHGRFWLMGLATSQTYVRCKSGQPSLDSLFCLTTLSMPATSNSLRLSLVSESELEVKKSENVSLQLQQSSDQLSFCEECSVKFESEARFLKSSNSNVTTVALPAWLQQYKKENQNSHTDSDSIKELVVKWNSICDSIHKRPSLKTLTLSSPTSSFSGSTQPSISTLHHLQTNGDWPVIETNTHRHHSVVHETSHLRLFIPEHDSENKCELVCSNPQSTMNSEASSSDAMELEHASSHFKEMNAENLATLCAALESKVPWQKDLVPELAKTVLKCRSGSSTRKINGNEDKKEDTWMFFQGLDVDAKEKIAREGAKLVFGSQDSFVSICLSCFSSTRSDSAEDLRNKRLRDEQSLSYIERFSEAVSLDPQRVILVEDIEQADYLSQVGFKRAVERGRVCNSSGEEATLKDAIVLLSCERFRSRSRACSPPSNQKSDVSDQPEDKNVATCVALDLNLSIDSAYVCEEESCDEIGLLEAVDARFHFKCTST

SEQ ID NO: 104 - DNA, 2445 bp, Artificial Sequence
  source 1..2445: /organism="Artificial Sequence" /note="CLP Variant" /mol_type="unassigned DNA"
atgagagccggcggctgcaccgtggagcaggccctgaccgccgacgccgccaacgtggtgaagcaggccatgggcctggccagaagaagaggccacgcccaggtgacccccctgcacgtggccagcaccatgctgagcgcccccaccggcctgctgagaaccgcctgcctgcagagccacacccaccccctgcagtgcagactgctggagctgagcttcaacgtggccctgaacagactgcccacctgcaccggcagccccatgctgggcgtgcccaccagccccttccccagcatcagcaacgccctgggcgccgccttcaagagagcccaggcccaccagagaagaggcagcatcgagagccagcagcagcccatcctggccgtgaagatcgaggtggagcagctgatcatcagcatcctggacgaccccagcgtgagcagagtgatgagagaggccggcttcagcagcccccaggtgaagaccaaggtggagcaggccgtgagcctggagatcagcagcaagagcaccagcagcagcaagcccaaggagggcaagctgctgacccccgtgagaaacgaggacgtgatgaacgtgatcaacaacctggtggacaagaagagaaagaacttcgtgatcgtgggcgagtgcctggccaccatcgacggcgtggtgaagaccgtgatggacaaggtggacaagaaggacgtgcccgaggtgctgaaggacgtgaagttcatcaccctgagcttcagcagcttcggccagcccagcagagccgacgtggagagaaagctggaggagctggagaccctggtgaagagctgcgtgggcaagggcgtgatcctgaacctgatcgacctgaactggttcgtggagagcagaaccagaggcagcagcctgtacaacaacaacgacagctactgcgtggtggagcacatgatcatggagatcggcaagctggcctgcggcctggtgatgggcgaccacggcagattctggctgatgggcctggccaccagccagacctacgtgagatgcaagagcggccagcccagcctggagagcctgtggtgcctgaccaccctgaccatccccgccaccagcaacagcctgagactgagcctggtgagcgagagcgagctggaggtgaagaagagcgagaacatcagcctgcagctgcagcagagcagcgaccagctgagcttctgcgaggagtgcagcgtgaagttcgagagcgaggccagattcctgaagagcagcaacagcaacgtgaccaccgtgctgctgcccgcctgggtgcagcagtacaagaaggagaaccagaacagccacaccgacagcgacagcatcagagagctggtggtgaagtggaacagcatctgcgacagcatccacaagagacccagcctgaagaccctgaccctgagcagccccaccagcagcttcagcggcagcacccagcccagcatcagcaccctgcaccacctgaacaccaacggcgactggcccgtgatcgagaccaacacccacagacaccacagcgtggtgcacgagaccagccacctgagactgttcatccccgagcacgacagcgagcagaagaccgagctggtgtgcagcaaccccaacagcaccatgaacagcgaggccagcagcaccgacgccatggagctggagcacgccagcagcagattcaaggagatgaacgccgagaacctggccaccctgtgcgccgccctggagagcaaggtgccctggaacaaggacctggtgcccgagctggccaagaccgtgctgaagtgcagaagcggcagcagcaccagaaagatcaacggcaacgaggacaagaaggaggacacctggatgttcttccagggcctggacgtggacgccaaggagaagatcgccagagagctggccaagctggtgttcggcagccaggacagcttcgtgagcatctgcctgagcagcttcagcagcaccagaagcgacagcgccgaggacctgagaaacaagagactgagagacgagcagagcctgagctacatcgagagattcagcgaggccgtgagcctggagcccaacagagtgatcctggtggaggacatcgagcaggccgactacctgagccaggtgggcttcaagagagccgtggagagaggcagagtgtgcaacagcagcggcgaggaggccagcctgaaggacgccatcgtgatcctgagctgcgagagatggagaagcagaagcagagcctgcagcccccccagcaaccagaagagcgacggcagcgaccagcccgaggacaagaacgtggccacctgcgtggccctggacctgaacctgagcatcgacagcgcctacgtgtgcgaggaggagagctgcgacgagatcggcctgctggaggccgtggacgccagattccacttcaagtgcagcagcacc

SEQ ID NO: 105 - protein, 815 aa, Artificial Sequence
  CLP Variant
MRAGGCTVEQALTADAANVVKQAMGLARRRGHAQVTPLHVASTMLSAPTGLLRTACLQSHTHPLQCRLLELSFNVALNRLPTCTGSPMLGVPTSPFPSISNALGAAFKRAQAHQRRGSIESQQQPILAVKIEVEQLIISILDDPSVSRVMREAGFSSPQVKTKVEQAVSLEISSKSTSSSKPKEGKLLTPVRNEDVMNVINNLVDKKRKNFVIVGECLATIDGVVKTVMDKVDKKDVPEVLKDVKFITLSFSSFGQPSRADVERKLEELETLVKSCVGKGVILNLIDLNWFVESRTRGSSLYNNNDSYCVVEHMIMEIGKLACGLVMGDHGRFWLMGLATSQTYVRCKSGQPSLESLWCLTTLTIPATSNSLRLSLVSESELEVKKSENISLQLQQSSDQLSFCEECSVKFESEARFLKSSNSNVTTVLLPAWVQQYKKENQNSHTDSDSIRELVVKWNSICDSIHKRPSLKTLTLSSPTSSFSGSTQPSISTLHHLNTNGDWPVIETNTHRHHSVVHETSHLRLFIPEHDSEQKTELVCSNPNSTMNSEASSTDAMELEHASSRFKEMNAENLATLCAALESKVPWNKDLVPELAKTVLKCRSGSSTRKINGNEDKKEDTWMFFQGLDVDAKEKIARELAKLVFGSQDSFVSICLSSFSSTRSDSAEDLRNKRLRDEQSLSYIERFSEAVSLEPNRVILVEDIEQADYLSQVGFKRAVERGRVCNSSGEEASLKDAIVILSCERWRSRSRACSPPSNQKSDGSDQPEDKNVATCVALDLNLSIDSAYVCEEESCDEIGLLEAVDARFHFKCSST
